(19) United States
(12) Patent Application Publication
(10) Pub. No.: US 2022/0273691 A1
(43) Pub. Date: Sep. 1, 2022

(54) MODULATORS OF HSD17B13 EXPRESSION

(71) Applicant: Ionis Pharmaceuticals, Inc., Carlsbad, CA (US)

(72) Inventors: Susan M. Freier, San Diego, CA (US); Susan F. MURRAY, San Diego, CA (US)

(73) Assignee: Ionis Pharmaceuticals, Inc., Carlsbad, CA (US)

(21) Appl. No.: 17/416,108

(22) PCT Filed: Dec. 20, 2019
(86) PCT No.: PCT/US2019/068051

§ 371 Date: Jun. 18, 2021

Related U.S. Application Data
(60) Provisional application No. 62/827,524, filed on Apr. 1, 2019.
(60) Provisional application No. 62/825,581, filed on Mar. 28, 2019.
(60) Provisional application No. 62/783,680, filed on Dec. 21, 2018.

(51) Int. Cl. A61K 31/7088; C12N 15/113; A61P 1/16

(52) U.S. Cl. CPC A61K 31/7088; A61P 1/16; C12N 15/1137

(57) ABSTRACT

Methods, compounds, and compositions useful for inhibiting HSD expression are provided. Such compounds, compositions, and methods are useful for treating, preventing, or ameliorating a disease associated with HSD 17B 13.

### SEQUENCE LISTING

[0001] The present application is being filed along with a Sequence Listing in electronic format. The Sequence Listing is provided as a file entitled BIOL0350WOSEQ_ST25.txt created Dec. 13, 2019, which is 640 kb in size. The information in the electronic format of the sequence listing is incorporated herein by reference in its entirety.

### FIELD

[0002] The present embodiments provide methods, compounds, and compositions useful for inhibiting hydroxysteroid 17-beta dehydrogenase 13 (LOC345275; 17-beta hydroxysteroid dehydrogenase; HSD17B13; HSD17β13) expression, and in certain instances, reducing the amount of HSD17B13 protein in a cell or animal, which can be useful for treating, preventing, or ameliorating a disease associated with HSD17B13.

### BACKGROUND

[0003] Non-alcoholic fatty liver disease (NAFLD) covers a spectrum of liver disease from steatosis to nonalcoholic steatohepatitis (NASH) and cirrhosis. NAFLD is defined as fat accumulation in the liver exceeding 5% by weight, in the absense of significant alcohol consumption, steatogenic medication, or hereditary disorders (Kotronen et al, Arterioscler Thromb. Vasc. Biol. 2008, 28: 27-38).

[0004] Non-alcoholic steatohepatitis (NASH) is NAFLD with signs of inflammation and hepatic injury. NASH is defined histologically by macrovesicular steatosis, hepatocellular ballooning, and lobular inflammatory infiltrates (Sanyal, Hepatol. Res. 2011. 41: 670-4). NASH is estimated to affect 2-3% of the general population. In the presence of other pathologies, such as obesity or diabetes, the estimated prevalence increases to 7% and 62% respectively (Hashimoto et al, J. Gastroenterol. 2011. 46(1): 63-69).

### SUMMARY

[0005] Certain embodiments provided herein are compounds and methods for reducing the amount or activity of HSD17B13 mRNA, and in certain embodiments, reducing the amount or activity of HSD17B13 protein in a cell or animal. In certain embodiments, the animal has a liver disease. In certain embodiments, the disease is NASH. In certain embodiments, the disease is alcoholic steatohepatitis (ASH). In certain embodiments, the disease is NAFLD. In certain embodiments, the disease is hepatic steatosis. In certain embodiments, the disease is cirrhosis. In certain embodiments, the disease is hepatocellular carcinoma. In certain embodiments, the disease is alcoholic liver disease. In certain embodiments, the disease is HCV hepatitis. In certain embodiments, the disease is chronic hepatitis. In certain embodiments, the disease is hereditary hemochromatosis. In certain embodiments, the disease is primary sclerosing cholangitis. Certain compounds provided herein are directed to compounds and compositions that reduce liver damage, steatosis, liver fibrosis, liver inflammation, liver scarring or cirrhosis, liver failure, liver enlargement, elevated transaminases, or hepatic fat accumulation in an animal.

[0006] Certain embodiments provided herein are directed to potent and tolerable compounds and compositions useful for inhibiting HSD17B13 expression, which can be useful for treating, preventing, ameliorating, or slowing progression of liver diseases. Certain embodiments provided herein are directed to compounds and compositions that are more potent or have greater therapeutic value than compounds publicly disclosed.

### DETAILED DESCRIPTION

[0007] It is to be understood that both the foregoing general description and the following detailed description are exemplary and explanatory only and are not restrictive of the embodiments, as claimed. Herein, the use of the singular includes the plural unless specifically stated otherwise. As used herein, the use of “or” means “and/or” unless stated otherwise. Furthermore, the use of the term “including” as well as other forms, such as “includes” and “included”, is not limiting.

[0008] The section headings used herein are for organizational purposes only and are not to be construed as limiting the subject matter described. All documents, or portions of documents, cited in this application, including, but not limited to, patents, patent applications, articles, books, treatises, and GenBank and NCBI reference sequence records are hereby expressly incorporated by reference for the portions of the document discussed herein, as well as in their entirety.

[0009] It is understood that the sequence set forth in each SEQ ID NO in the examples contained herein is independent of any modification to a sugar moiety, an internucleoside linkage, or a nucleobase. As such, compounds defined by a SEQ ID NO may comprise, independently, one or more modifications to a sugar moiety, an internucleoside linkage, or a nucleobase. Compounds described by ION number indicate a combination of nucleobase sequence, chemical modification, and motif.

### Definitions

[0010] Unless otherwise indicated, the following terms have the following meanings:

[0011] “2′-deoxyfuranosyl sugar moiety” or “2′-deoxyfuranosyl sugar” means a furanosyl sugar moiety having two hydrogens at the 2′-position. 2′-deoxyfuranosyl sugar moieties may be unmodified or modified and may be substituted at positions other than the 2′-position or unsubstituted. A β-D-2′-deoxyribosyl sugar moiety in the context of an oligonucleotide is an unsubstituted, unmodified 2′-deoxyfuranosyl and is found in naturally occurring deoxyribonucleic acids (DNA).

[0012] “2′-deoxynucleoside” means a nucleoside comprising 2′-H(H) furanosyl sugar moiety, as found in naturally occurring deoxyribonucleic acids (DNA). In certain embodiments, a 2′-deoxynucleoside may comprise a modified nucleobase or may comprise an RNA nucleobase (uracil).

[0013] “2′-O-methoxyethyl” (also 2′-MOE) refers to a 2′-O(CH₂)₂—OCH₃) in the place of the 2′-OH group of a ribosyl ring. A 2′-O-methoxyethyl modified sugar is a modified sugar.

[0014] “2′-MOE nucleoside” (also 2′-O-methoxyethyl nucleoside) means a nucleoside comprising a 2′-MOE modified sugar moiety.

[0015] “2′-substituted nucleoside” or “2-modified nucleoside” means a nucleoside comprising a 2′-substituted or 2′-modified sugar moiety. As used herein, “2′-substituted” or “2-modified” in reference to a sugar moiety means a sugar moiety comprising at least one 2′-substituent group other than H or OH.

[0016] “3′ target site” refers to the nucleotide of a target nucleic acid which is complementary to the 3′-most nucleotide of a particular compound.

[0017] “5′ target site” refers to the nucleotide of a target nucleic acid which is complementary to the 5′-most nucleotide of a particular compound.

[0018] “5-methylcytosine” means a cytosine with a methyl group attached to the 5 position.

[0019] “About” means within ±10% of a value. For example, if it is stated, “the compounds affected about 70% inhibition of HSD17B13”, it is implied that HSD17B13 levels are inhibited within a range of 60% and 80%.

[0020] “Administration” or “administering” refers to routes of introducing a compound or composition provided herein to an individual to perform its intended function. An example of a route of administration that can be used includes, but is not limited to parenteral administration, such as subcutaneous, intravenous, or intramuscular injection or infusion.

[0021] “Administered concomitantly” or “co-administration” means administration of two or more compounds in any manner in which the pharmacological effects of both are manifest in the patient. Concomitant administration does not require that both compounds be administered in a single pharmaceutical composition, in the same dosage form, by the same route of administration, or at the same time. The effects of both compounds need not manifest themselves at the same time. The effects need only be overlapping for a period of time and need not be coextensive. Concomitant administration or co-administration encompasses administration in parallel or sequentially.

[0022] “Amelioration” refers to an improvement or lessening of at least one indicator, sign, or symptom of an associated disease, disorder, or condition. In certain embodiments, amelioration includes a delay or slowing in the progression or severity of one or more indicators of a condition or disease. The progression or severity of indicators may be determined by subjective or objective measures, which are known to those skilled in the art.

[0023] “Animal” refers to a human or non-human animal, including, but not limited to, mice, rats, rabbits, dogs, cats, pigs, and non-human primates, including, but not limited to, monkeys and chimpanzees.

[0024] “Antisense activity” means any detectable and/or measurable activity attributable to the hybridization of an antisense compound to its target nucleic acid. In certain embodiments, antisense activity is a decrease in the amount or expression of a target nucleic acid or protein encoded by such target nucleic acid compared to target nucleic acid levels or target protein levels in the absence of the antisense compound to the target.

[0025] “Antisense compound” means a compound comprising an oligonucleotide and optionally one or more additional features, such as a conjugate group or terminal group. Examples of antisense compounds include single-stranded and double-stranded compounds, such as, oligonucleotides, ribozymes, siRNAs, shRNAs, ssRNAs, and occupancy-based compounds.

[0026] “Antisense inhibition” means reduction of target nucleic acid levels in the presence of an antisense compound complementary to a target nucleic acid compared to target nucleic acid levels in the absence of the antisense compound.

[0027] “Antisense mechanisms” are all those mechanisms involving hybridization of a compound with target nucleic acid, wherein the outcome or effect of the hybridization is either target degradation or target occupancy with concomitant stalling of the cellular machinery involving, for example, transcription or splicing.

[0028] “Antisense oligonucleotide” means an oligonucleotide having a nucleobase sequence that is complementary to a target nucleic acid or region or segment thereof. In certain embodiments, an antisense oligonucleotide is specifically hybridizable to a target nucleic acid or region or segment thereof.

[0029] “Bicyclic nucleoside” or “BNA” means a nucleoside comprising a bicyclic sugar moiety. “Bicyclic sugar” or “bicyclic sugar moiety” means a modified sugar moiety comprising two rings, wherein the second ring is formed via a bridge connecting two of the atoms in the first ring thereby forming a bicyclic structure. In certain embodiments, the first ring of the bicyclic sugar moiety is a furanosyl moiety. In certain embodiments, the bicyclic sugar moiety does not comprise a furanosyl moiety.

[0030] “Branching group” means a group of atoms having at least 3 positions that are capable of forming covalent linkages to at least 3 groups. In certain embodiments, a branching group provides a plurality of reactive sites for connecting tethered ligands to an oligonucleotide via a conjugate linker and/or a cleavable moiety.

[0031] “Cell-targeting moiety” means a conjugate group or portion of a conjugate group that is capable of binding to a particular cell type or particular cell types.

[0032] “cEt” or “constrained ethyl” means a ribosyl bicyclic sugar moiety wherein the second ring of the bicyclic sugar is formed via a bridge connecting the 4′-carbon and the 2′-carbon, wherein the bridge has the formula: 4′-CH(CH₃)—O-2′, and wherein the methyl group of the bridge is in the S configuration.

[0033] “cEt nucleoside” means a nucleoside comprising a cEt modified sugar moiety.

[0034] “Chemical modification” in a compound describes the substitutions or changes through chemical reaction, of any of the units in the compound relative to the original state of such unit. “Modified nucleoside” means a nucleoside having, independently, a modified sugar moiety and/or modified nucleobase. “Modified oligonucleotide” means an oligonucleotide comprising at least one modified internucleoside linkage, a modified sugar, and/or a modified nucleobase.

[0035] “Chemically distinct region” refers to a region of a compound that is in some way chemically different than another region of the same compound. For example, a region having 2′-O-methoxyethyl nucleotides is chemically distinct from a region having nucleotides without 2′-O-methoxyethyl modifications.

[0036] “Chimeric antisense compounds” means antisense compounds that have at least 2 chemically distinct regions, each position having a plurality of subunits.

[0037] “Cleavable bond” means any chemical bond capable of being split. In certain embodiments, a cleavable bond is selected from among: an amide, a polyamide, an ester, an ether, one or both esters of a phosphodiester, a phosphate ester, a carbamate, a di-sulfide, or a peptide.

[0038] “Cleavable moiety” means a bond or group of atoms that is cleaved under physiological conditions, for example, inside a cell, an animal, or a human.

[0039] “Complementary” in reference to an oligonucleotide means the nucleobase sequence of such oligonucleotide or one or more regions thereof matches the nucleobase sequence of another oligonucleotide or nucleic acid or one or more regions thereof when the two nucleobase sequences are aligned in opposing directions. Nucleobase matches or complementary nucleobases, as described herein, are limited to the following pairs: adenine (A) and thymine (T), adenine (A) and uracil (U), cytosine (C) and guanine (G), and 5-methyl cytosine (^{m}C) and guanine (G) unless otherwise specified. Complementary oligonucleotides and/or nucleic acids need not have nucleobase complementarity at each nucleoside and may include one or more nucleobase mismatches. By contrast, “fully complementary” or “100% complementary” in reference to oligonucleotides means that such oligonucleotides have nucleobase matches at each nucleoside without any nucleobase mismatches.

[0040] “Conjugate group” means a group of atoms that is attached to an oligonucleotide. Conjugate groups include a conjugate moiety and a conjugate linker that attaches the conjugate moiety to the oligonucleotide.

[0041] “Conjugate linker” means a group of atoms comprising at least one bond that connects a conjugate moiety to an oligonucleotide.

[0042] “Conjugate moiety” means a group of atoms that is attached to an oligonucleotide via a conjugate linker.

[0043] “Contiguous” in the context of an oligonucleotide refers to nucleosides, nucleobases, sugar moieties, or internucleoside linkages that are immediately adjacent to each other. For example, “contiguous nucleobases” means nucleobases that are immediately adjacent to each other in a sequence.

[0044] “Designing” or “Designed to” refer to the process of designing a compound that specifically hybridizes with a selected nucleic acid molecule.

[0045] “Diluent” means an ingredient in a composition that lacks pharmacological activity, but is pharmaceutically necessary or desirable. For example, the diluent in an injected composition can be a liquid, e.g. saline solution.

[0046] “Differently modified” means chemical modifications or chemical substituents that are different from one another, including absence of modifications. Thus, for example, a MOE nucleoside and an unmodified DNA nucleoside are “differently modified,” even though the DNA nucleoside is unmodified. Likewise, DNA and RNA are “differently modified,” even though both are naturally-occurring unmodified nucleosides. Nucleosides that are the same but for comprising different nucleobases are not differently modified. For example, a nucleoside comprising a 2′-OMe modified sugar and an unmodified adenine nucleobase and a nucleoside comprising a 2′-OMe modified sugar and an unmodified thymine nucleobase are not differently modified.

[0047] “Dose” means a specified quantity of a compound or pharmaceutical agent provided in a single administration, or in a specified time period. In certain embodiments, a dose may be administered in two or more boluses, tablets, or injections. For example, in certain embodiments, where subcutaneous administration is desired, the desired dose may require a volume not easily accommodated by a single injection. In such embodiments, two or more injections may be used to achieve the desired dose. In certain embodiments, a dose may be administered in two or more injections to minimize injection site reaction in an individual. In other embodiments, the compound or pharmaceutical agent is administered by infusion over an extended period of time or continuously. Doses may be stated as the amount of pharmaceutical agent per hour, day, week or month.

[0048] “Dosing regimen” is a combination of doses designed to achieve one or more desired effects.

[0049] “Double-stranded antisense compound” means an antisense compound comprising two oligomeric compounds that are complementary to each other and form a duplex, and wherein one of the two said oligomeric compounds comprises an oligonucleotide.

[0050] “Effective amount” means the amount of compound sufficient to effectuate a desired physiological outcome in an individual in need of the compound. The effective amount may vary among individuals depending on the health and physical condition of the individual to be treated, the taxonomic group of the individuals to be treated, the formulation of the composition, assessment of the individual's medical condition, and other relevant factors.

[0051] “Efficacy” means the ability to produce a desired effect.

[0052] “Expression” includes all the functions by which a gene's coded information is converted into structures present and operating in a cell. Such structures include, but are not limited to, the products of transcription and translation.

[0053] “Gapmer” means an oligonucleotide comprising an internal region having a plurality of nucleosides that support RNase H cleavage positioned between external regions having one or more nucleosides, wherein the nucleosides comprising the internal region are chemically distinct from the nucleoside or nucleosides comprising the external regions. The internal region may be referred to as the “gap” and the external regions may be referred to as the “wings.”

[0054] “HSD17B13” means any nucleic acid or protein of HSD17B13. “HSD17B13 nucleic acid” means any nucleic acid encoding HSD17B13. For example, in certain embodiments, a HSD17B13 nucleic acid includes a DNA sequence encoding HSD17B13, an RNA sequence transcribed from DNA encoding HSD17B13 (including genomic DNA comprising introns and exons), and an mRNA sequence encoding HSD17B13. “HSD17B13 mRNA” means an mRNA encoding a HSD17B13 protein. The target may be referred to in either upper or lower case.

[0055] “HSD17B13 specific inhibitor” refers to any agent capable of specifically inhibiting HSD17B13 RNA and/or HSD17B13 protein expression or activity at the molecular level. For example, HSD17B13 specific inhibitors include nucleic acids (including antisense compounds), peptides, antibodies, small molecules, and other agents capable of inhibiting the expression of HSD17B13 RNA and/or HSD17B13 protein.

[0056] “Hybridization” means the annealing of oligonucleotides and/or nucleic acids. While not limited to a particular mechanism, the most common mechanism of hybridization involves hydrogen bonding, which may be Watson-Crick, Hoogsteen or reversed Hoogsteen hydrogen bonding, between complementary nucleobases. In certain embodiments, complementary nucleic acid molecules include, but are not limited to, an antisense compound and a nucleic acid target. In certain embodiments, complementary nucleic acid molecules include, but are not limited to, an oligonucleotide and a nucleic acid target.

[0057] “Immediately adjacent” means there are no intervening elements between the immediately adjacent elements of the same kind (e.g. no intervening nucleobases between the immediately adjacent nucleobases).

[0058] “Individual” means a human or non-human animal selected for treatment or therapy.

[0059] “Inhibiting the expression or activity” refers to a reduction or blockade of the expression or activity relative to the expression of activity in an untreated or control sample and does not necessarily indicate a total elimination of expression or activity.

[0060] “Internucleoside linkage” means a group or bond that forms a covalent linkage between adjacent nucleosides in an oligonucleotide. “Modified internucleoside linkage” means any internucleoside linkage other than a naturally occurring, phosphate internucleoside linkage. Non-phosphate linkages are referred to herein as modified internucleoside linkages.

[0061] “Lengthened oligonucleotides” are those that have one or more additional nucleosides relative to an oligonucleotide disclosed herein, e.g. a parent oligonucleotide.

[0062] “Linked nucleosides” means adjacent nucleosides linked together by an internucleoside linkage.

[0063] “Linker-nucleoside” means a nucleoside that links an oligonucleotide to a conjugate moiety. Linker-nucleosides are located within the conjugate linker of a compound. Linker-nucleosides are not considered part of the oligonucleotide portion of a compound even if they are contiguous with the oligonucleotide.

[0064] “Mismatch” or “non-complementary” means a nucleobase of a first oligonucleotide that is not complementary to the corresponding nucleobase of a second oligonucleotide or target nucleic acid when the first and second oligonucleotides are aligned. For example, nucleobases including but not limited to a universal nucleobase, inosine, and hypoxanthine, are capable of hybridizing with at least one nucleobase but are still mismatched or non-complementary with respect to nucleobase to which it hybridized. As another example, a nucleobase of a first oligonucleotide that is not capable of hybridizing to the corresponding nucleobase of a second oligonucleotide or target nucleic acid when the first and second oligonucleotides are aligned is a mismatch or non-complementary nucleobase.

[0065] “Modulating” refers to changing or adjusting a feature in a cell, tissue, organ or organism. For example, modulating HSD17B13 RNA can mean to increase or decrease the level of HSD17B13 RNA and/or HSD17B13 protein in a cell, tissue, organ or organism. A “modulator” effects the change in the cell, tissue, organ or organism. For example, a HSD17B13 compound can be a modulator that decreases the amount of HSD17B13 RNA and/or HSD17B13 protein in a cell, tissue, organ or organism.

[0066] “MOE” means methoxyethyl.

[0067] “Monomer” refers to a single unit of an oligomer. Monomers include, but are not limited to, nucleosides and nucleotides.

[0068] “Motif” means the pattern of unmodified and/or modified sugar moieties, nucleobases, and/or internucleoside linkages, in an oligonucleotide.

[0069] “Natural” or “naturally occurring” means found in nature.

[0070] “Non-bicyclic modified sugar” or “non-bicyclic modified sugar moiety” means a modified sugar moiety that comprises a modification, such as a substituent, that does not form a bridge between two atoms of the sugar to form a second ring.

[0071] “Nucleic acid” refers to molecules composed of monomeric nucleotides. A nucleic acid includes, but is not limited to, ribonucleic acids (RNA), deoxyribonucleic acids (DNA), single-stranded nucleic acids, and double-stranded nucleic acids.

[0072] “Nucleobase” means a heterocyclic moiety capable of pairing with a base of another nucleic acid. As used herein a “naturally occurring nucleobase” is adenine (A), thymine (T), cytosine (C), uracil (U), and guanine (G). A “modified nucleobase” is a naturally occurring nucleobase that is chemically modified. A “universal base” or “universal nucleobase” is a nucleobase other than a naturally occurring nucleobase and modified nucleobase, and is capable of pairing with any nucleobase.

[0073] “Nucleobase sequence” means the order of contiguous nucleobases in a nucleic acid or oligonucleotide independent of any sugar or internucleoside linkage.

[0074] “Nucleoside” means a compound comprising a nucleobase and a sugar moiety. The nucleobase and sugar moiety are each, independently, unmodified or modified. “Modified nucleoside” means a nucleoside comprising a modified nucleobase and/or a modified sugar moiety. Modified nucleosides include abasic nucleosides, which lack a nucleobase.

[0075] “Oligomeric compound” means a compound comprising a single oligonucleotide and, optionally, one or more additional features, such as a conjugate group or terminal group.

[0076] “Oligonucleotide” means a polymer of linked nucleosides each of which can be modified or unmodified, independent one from another. Unless otherwise indicated, oligonucleotides consist of 8-80 linked nucleosides. “Modified oligonucleotide” means an oligonucleotide, wherein at least one sugar, nucleobase, or internucleoside linkage is modified. “Unmodified oligonucleotide” means an oligonucleotide that does not comprise any sugar, nucleobase, or internucleoside modification.

[0077] “Parent oligonucleotide” means an oligonucleotide whose sequence is used as the basis of design for more oligonucleotides of similar sequence but with different lengths, motifs, and/or chemistries. The newly designed oligonucleotides may have the same or overlapping sequence as the parent oligonucleotide.

[0078] “Parenteral administration” means administration through injection or infusion. Parenteral administration includes subcutaneous administration, intravenous administration, intramuscular administration, intraarterial administration, intraperitoneal administration, or intracranial administration, e.g. intrathecal or intracerebroventricular administration.

[0079] “Pharmaceutically acceptable carrier or diluent” means any substance suitable for use in administering to an individual. For example, a pharmaceutically acceptable carrier can be a sterile aqueous solution, such as PBS or water-for-injection.

[0080] “Pharmaceutically acceptable salts” means physiologically and pharmaceutically acceptable salts of compounds, such as oligomeric compounds or oligonucleotides, i.e., salts that retain the desired biological activity of the parent compound and do not impart undesired toxicological effects thereto.

[0081] “Pharmaceutical agent” means a compound that provides a therapeutic benefit when administered to an individual.

[0082] “Pharmaceutical composition” means a mixture of substances suitable for administering to an individual. For example, a pharmaceutical composition may comprise one or more compounds or salt thereof and a sterile aqueous solution.

[0083] “Phosphorothioate linkage” means a modified phosphate linkage in which one of the non-bridging oxygen atoms is replaced with a sulfur atom. A phosphorothioate internucleoside linkage is a modified internucleoside linkage.

[0084] “Phosphorus moiety” means a group of atoms comprising a phosphorus atom. In certain embodiments, a phosphorus moiety comprises a mono-, di-, or tri-phosphate, or phosphorothioate.

[0085] “Portion” means a defined number of contiguous (i.e., linked) nucleobases of a nucleic acid. In certain embodiments, a portion is a defined number of contiguous nucleobases of a target nucleic acid. In certain embodiments, a portion is a defined number of contiguous nucleobases of an oligomeric compound.

[0086] “Prevent” refers to delaying or forestalling the onset, development or progression of a disease, disorder, or condition for a period of time from minutes to indefinitely.

[0087] “Prodrug” means a compound in a form outside the body which, when administered to an individual, is metabolized to another form within the body or cells thereof. In certain embodiments, the metabolized form is the active, or more active, form of the compound (e.g., drug). Typically conversion of a prodrug within the body is facilitated by the action of an enzyme(s) (e.g., endogenous or viral enzyme) or chemical(s) present in cells or tissues, and/or by physiologic conditions.

[0088] “Reduce” means to bring down to a smaller extent, size, amount, or number.

[0089] “RefSeq No.” is a unique combination of letters and numbers assigned to a sequence to indicate the sequence is for a particular target transcript (e.g., target gene). Such sequence and information about the target gene (collectively, the gene record) can be found in a genetic sequence database. Genetic sequence databases include the NCBI Reference Sequence database, GenBank, the European Nucleotide Archive, and the DNA Data Bank of Japan (the latter three forming the International Nucleotide Sequence Database Collaboration or INSDC).

[0090] “Region” is defined as a portion of the target nucleic acid having at least one identifiable structure, function, or characteristic.

[0091] “RNAi compound” means an antisense compound that acts, at least in part, through RISC or Ago2, but not through RNase H, to modulate a target nucleic acid and/or protein encoded by a target nucleic acid. RNAi compounds include, but are not limited to double-stranded siRNA, single-stranded RNA (ssRNA), and microRNA, including microRNA mimics.

[0092] “Segments” are defined as smaller or sub-portions of regions within a nucleic acid.

[0093] “Side effects” means physiological disease and/or conditions attributable to a treatment other than the desired effects. In certain embodiments, side effects include injection site reactions, liver function test abnormalities, renal function abnormalities, liver toxicity, renal toxicity, central nervous system abnormalities, myopathies, and malaise. For example, increased aminotransferase levels in serum may indicate liver toxicity or liver function abnormality. For example, increased bilirubin may indicate liver toxicity or liver function abnormality.

[0094] “Single-stranded” in reference to a compound means the compound has only one oligonucleotide.

[0095] “Self-complementary” means an oligonucleotide that at least partially hybridizes to itself. A compound consisting of one oligonucleotide, wherein the oligonucleotide of the compound is self-complementary, is a single-stranded compound. A single-stranded compound may be capable of binding to a complementary compound to form a duplex.

[0096] “Sites” are defined as unique nucleobase positions within a target nucleic acid.

[0097] “Specifically hybridizable” refers to an oligonucleotide having a sufficient degree of complementarity between the oligonucleotide and a target nucleic acid to induce a desired effect, while exhibiting minimal or no effects on non-target nucleic acids. In certain embodiments, specific hybridization occurs under physiological conditions.

[0098] “Specifically inhibit” with reference to a target nucleic acid means to reduce or block expression of the target nucleic acid while exhibiting fewer, minimal, or no effects on non-target nucleic acids. Reduction does not necessarily indicate a total elimination of the target nucleic acid's expression.

[0099] “Standard cell assay” means assay(s) described in the Examples and reasonable variations thereof

[0100] “Standard in vivo experiment” means the procedure(s) described in the Example(s) and reasonable variations thereof.

[0101] “Stereorandom chiral center” in the context of a population of molecules of identical molecular formula means a chiral center having a random stereochemical configuration. For example, in a population of molecules comprising a stereorandom chiral center, the number of molecules having the (S) configuration of the stereorandom chiral center may be but is not necessarily the same as the number of molecules having the (R) configuration of the stereorandom chiral center. The stereochemical configuration of a chiral center is considered random when it is the result of a synthetic method that is not designed to control the stereochemical configuration. In certain embodiments, a stereorandom chiral center is a stereorandom phosphorothioate internucleoside linkage.

[0102] “Sugar moiety” means an unmodified sugar moiety or a modified sugar moiety. As used herein, “unmodified sugar moiety” means a β-D-ribosyl moiety, as found in naturally occurring RNA, or a β-D-2′-deoxyribosyl sugar moiety as found in naturally occurring DNA. As used herein, “modified sugar moiety” or “modified sugar” means a sugar surrogate or a furanosyl sugar moiety other than a β-D-ribosyl or a β-D-2′-deoxyribosyl. Modified furanosyl sugar moieties may be modified or substituted at a certain position(s) of the sugar moiety, substituted, or unsubstituted, and they may or may not have a stereoconfiguration other than β-D-ribosyl. Modified furanosyl sugar moieties include bicyclic sugars and non-bicyclic sugars.

[0103] “Sugar surrogate” means a modified sugar moiety that does not comprise a furanosyl or tetrahydrofuranyl ring (is not a “furanosyl sugar moiety”) and that can link a nucleobase to another group, such as an internucleoside linkage, conjugate group, or terminal group in an oligonucleotide. Modified nucleosides comprising sugar surrogates can be incorporated into one or more positions within an oligonucleotide and such oligonucleotides are capable of hybridizing to complementary oligomeric compounds or nucleic acids.

[0104] “Synergy” or “synergize” refers to an effect of a combination that is greater than additive of the effects of each component alone at the same doses.

[0105] “Target gene” refers to a gene encoding a target.

[0106] “Targeting” means the specific hybridization of a compound to a target nucleic acid in order to induce a desired effect.

[0107] “Target nucleic acid,” “target RNA,” “target RNA transcript” and “nucleic acid target” all mean a nucleic acid capable of being targeted by compounds described herein.

[0108] “Target region” means a portion of a target nucleic acid to which one or more compounds is targeted.

[0109] “Target segment” means the sequence of nucleotides of a target nucleic acid to which a compound is targeted. “5′ target site” refers to the 5′-most nucleotide of a target segment. “3′ target site” refers to the 3′-most nucleotide of a target segment.

[0110] “Terminal group” means a chemical group or group of atoms that is covalently linked to a terminus of an oligonucleotide.

[0111] “Therapeutically effective amount” means an amount of a compound, pharmaceutical agent, or composition that provides a therapeutic benefit to an individual.

[0112] “Treat” refers to administering a compound or pharmaceutical composition to an animal in order to effect an alteration or improvement of a disease, disorder, or condition in the animal.

### Certain Embodiments

[0113] Certain embodiments provide methods, compounds and compositions for inhibiting HSD17B13 expression.

[0114] Certain embodiments provide compounds targeted to a HSD17B13 nucleic acid. In certain embodiments, the HSD17B13 nucleic acid has the sequence set forth in RefSeq or GENBANK Accession No. NM_178135.4 (incorporated by reference, disclosed herein as SEQ ID NO: 1), the complement of GENBANK Accession No. NC_000004.12 truncated from nucleotides 87301001 to U.S. Pat. No. 87,326,000 (incorporated by reference, disclosed herein as SEQ ID NO: 2), the sequence listed as SEQ ID NO: 3, or GENBANK Accession No. NM_001136230.2 (incorporated by reference, disclosed herein as SEQ ID NO: 4). In certain embodiments, the compound is an antisense compound or oligomeric compound. In certain embodiments, the compound is single-stranded. In certain embodiments, the compound is double-stranded.

[0115] Certain embodiments provide a compound comprising a modified oligonucleotide consisting of 8 to 80 linked nucleosides and having a nucleobase sequence comprising at least 8 contiguous nucleobases of any of the nucleobase sequences of 8-2896. In certain embodiments, the compound is an antisense compound or oligomeric compound. In certain embodiments, the compound is single-stranded. In certain embodiments, the compound is double-stranded. In certain embodiments, the modified oligonucleotide consists of 10 to 30 linked nucleosides.

[0116] Certain embodiments provide a compound comprising a modified oligonucleotide consisting of 9 to 80 linked nucleosides and having a nucleobase sequence comprising at least 9 contiguous nucleobases of any of the nucleobase sequences of 8-2896. In certain embodiments, the compound is an antisense compound or oligomeric compound. In certain embodiments, the compound is single-stranded. In certain embodiments, the compound is double-stranded. In certain embodiments, the modified oligonucleotide consists of 10 to 30 linked nucleosides.

[0117] Certain embodiments provide a compound comprising a modified oligonucleotide consisting of 10 to 80 linked nucleosides and having a nucleobase sequence comprising at least 10 contiguous nucleobases of any of the nucleobase sequences of 8-2896. In certain embodiments, the compound is an antisense compound or oligomeric compound. In certain embodiments, the compound is single-stranded. In certain embodiments, the compound is double-stranded. In certain embodiments, the modified oligonucleotide consists of 10 to 30 linked nucleosides.

[0118] Certain embodiments provide a compound comprising a modified oligonucleotide consisting of 11 to 80 linked nucleosides and having a nucleobase sequence comprising at least 11 contiguous nucleobases of any of the nucleobase sequences of 8-2896. In certain embodiments, the compound is an antisense compound or oligomeric compound. In certain embodiments, the compound is single-stranded. In certain embodiments, the compound is double-stranded. In certain embodiments, the modified oligonucleotide consists of 11 to 30 linked nucleosides.

[0119] Certain embodiments provide a compound comprising a modified oligonucleotide consisting of 12 to 80 linked nucleosides and having a nucleobase sequence comprising at least 12 contiguous nucleobases of any of the nucleobase sequences of 8-2896. In certain embodiments, the compound is an antisense compound or oligomeric compound. In certain embodiments, the compound is single-stranded. In certain embodiments, the compound is double-stranded. In certain embodiments, the modified oligonucleotide consists of 12 to 30 linked nucleosides.

[0120] Certain embodiments provide a compound comprising a modified oligonucleotide consisting of 16 to 80 linked nucleosides and having a nucleobase sequence comprising the nucleobase sequence of any one of 8-2896. In certain embodiments, the compound is an antisense compound or oligomeric compound. In certain embodiments, the compound is single-stranded. In certain embodiments, the compound is double-stranded. In certain embodiments, the modified oligonucleotide consists of 16 to 30 linked nucleosides.

[0121] Certain embodiments provide a compound comprising a modified oligonucleotide having a nucleobase sequence consisting of the nucleobase sequence of any one of 8-2896. In certain embodiments, the compound is an antisense compound or oligomeric compound. In certain embodiments, the compound is single-stranded. In certain embodiments, the compound is double-stranded.

[0122] Certain embodiments provide a compound comprising a modified oligonucleotide consisting of 12 to 30 linked nucleosides and having at least an 8, 9, 10, 11, 12, 13, 14, 15, or 16 contiguous nucleobase portion complementary to an equal length portion within nucleobases 3095-3369, 3371-7564, 7565-7672, 7673-8777, 8778-8909, 8910-10401, 10402-10508, 10509-12040, 12041-12178, 12179-15641, 15642-15758, 15759-20692, or 20693-22212 of SEQ ID NO: 2, wherein said modified oligonucleotide is at least 85%, at least 90%, at least 95%, or 100% complementary to SEQ ID NO: 2. In certain embodiments, the compound is an antisense compound or oligomeric compound. In certain embodiments, the compound is single-stranded. In certain embodiments, the compound is double-stranded. In certain embodiments, the modified oligonucleotide consists of 10 to 30 linked nucleosides. In certain embodiments, the modified oligonucleotide consists of 16 to 30 linked nucleosides.

[0123] In certain embodiments, a compound comprises a modified oligonucleotide consisting of 8 to 80 linked nucleosides and having at least an 8, 9, 10, 11, 12, 13, 14, 15, or 16 contiguous nucleobase portion complementary to an equal length portion within nucleobases 1-46, 58-142, 1-142, 74-89, 154-197, 154-234, 200-232, 218-234, 240-345, 254-269, 354-746, 354-830, 519-534, 565-580, 603-628, 693-716, 734-750, 734-830, 749-828, 835-862, 835-957, 966-1044, 1017-1043, 1054-1106, 1055-1070, 1075-1169, 1074-1132, 1136-1169, 1175-1218, 1180-1217, 1250-1292, 1251-1279, 1296-1146, 1296-1448, 1308-1448, 1461-1481, 1461-1519, 1461-1647, 1461-1646, 1483-1535, 1538-1646, 1544-1561, 1597-1645, 1654-1685, 1654-1817, 1702-1817, 1705-1741, 1748-2211, 2174-2219, 2240-2272, 2244-2272, 2349-2370, 2350-2371, or 2378-2394 of an HSD17B13 nucleic acid having the nucleobase sequence of SEQ ID NO: 1.

[0124] In certain embodiments, a compound comprises a modified oligonucleotide consisting of 8 to 80 linked nucleosides and having at least an 8, 9, 10, 11, 12, 13, 14, 15, or 16 contiguous nucleobase portion complementary to an equal length portion within nucleobases 1-46, 58-142, 1-142, 74-89, 154-197, 154-234, 200-232, 218-234, 240-345, 254-269, 354-746, 354-830, 519-534, 565-580, 603-628, 693-716, 734-750, 734-830, 749-828, 835-862, 835-957, 966-1044, 1017-1043, 1054-1106, 1055-1070, 1075-1169, 1074-1132, 1136-1169, 1175-1218, 1180-1217, 1250-1292, 1251-1279, 1296-1146, 1296-1448, 1308-1448, 1461-1481, 1461-1519, 1461-1647, 1461-1646, 1483-1535, 1538-1646, 1544-1561, 1597-1645, 1654-1685, 1654-1817, 1702-1817, 1705-1741, 1748-2211, 2174-2219, 2240-2272, 2244-2272, 2349-2370, 2350-2371, or 2378-2394 of an HSD17B13 nucleic acid having the nucleobase sequence of SEQ ID NO: 1.

[0125] In certain embodiments, compounds target within nucleobases 3095-3454, 3095-3140, 3152-3236, 3168-3183, 3248-3328, 3312-3328, 3334-3390, 3348-3390, 3401-3420, 3429-3451, 3429-3454, 3474-3719, 3474-3644, 3478-3494, 3505-3531, 3544-3559, 3568-3634, 3671-3736, 3676-3717, 3721-3799, 3741-3771, 3750-3770, 3782-3799, 3834-3849, 3834-4154, 3877-3897, 3902-3917, 3933-3967, 3933-3979, 3988-4005, 3988-4017, 4068-4091, 4103-4118, 4123-4155, 4133-4155, 4220-4240, 4220-4264, 4249-4264, 4222-4240, 4296-4311, 4360-4378, 4389-4427, 4389-4431, 4405-4449, 4476-4496, 4517-4588, 4517-4552, 4537-4552, 4572-4588, 4640-4678, 4640-4879, 4641-4667, 4862-4879, 4991-5006, 4991-5305, 5029-5098, 5046-5098, 5104-5120, 5121-5141, 5125-5141, 5156-5256, 5158-5217, 5223-5242, 5267-5319, 5268-5319, 5395-5950, 5646-5695, 5655-5858, 5712-5752, 5712-5777, 5758-5777, 5782-5797, 5782-5862, 5804-5862, 5870-5910, 5871-6005, 5870-5910, 5870-5911, 5916-6007, 5935-5950, 5974-6007, 6029-6048, 6029-6055, 6035-6164, 6084-6099, 6084-6104, 6134-6164, 6170-6248, 6170-6275, 6170-6277, 6191-6218, 6221-6243, 6246-6275, 6284-6350, 6284-6352, 6298-6372, 6357-6372, 6388-6406, 6422-6493, 6422-6497, 6426-6621, 6567-6758, 6567-6582, 6597-6653, 6626-6653, 6710-6779, 6784-6811, 6785-6800, 6795-6811, 6913-6930, 6914-6929, 6914-6930, 6915-6930, 7101-7138, 7101-7441, 7125-7145, 7426-7441, 7473-7494, 7473-7498, 7481-7498, 7526-7543, 7550-7565, 7550-7634, 7563-7699, 7643-7676, 7680-7698, 7680-7699, 7708-7723, 7751-7819, 7768-7796, 7828-7866, 7834-7969, 7938-7968, 7938-7969, 7973-7994, 8017-8032, 8039-8186, 8039-8065, 8040-8065, 8121-8156, 8125-8151, 8164-8185, 8164-8186, 8205-8297, 8205-8220, 8236-8252, 8236-8271, 8256-8294, 8279-8297, 8487-8502, 8487-8627, 8529-8579, 8587-8628, 8636-8732, 8643-8910, 8744-8762, 8786-8910, 8939-9027, 8939-8996, 9000-9027, 9057-9096, 9080-9230, 9110-9173, 9188-9240, 9256-9275, 9312-9365, 9372-9401, 9373-9394, 9410-9446, 9410-9491, 9476-9555, 9497-9555, 9588-9678, 9588-9681, 9712-9737, 9712-9742, 9751-9811, 9751-10040, 9887-9902, 9908-10017, 10025-10040, 10058-10079, 10112-10160, 10124-10160, 10138-10160, 10180-10227, 10180-10233, 10258-10279, 10292-10310, 10293-10310, 10335-10375, 10335-10538, 10380-10538, 10554-10569, 10584-10599, 10728-10745, 10831-10870, 10930-10946, 10931-10946, 10970-10993, 10971-11015, 1100-11015, 11030-11045, 11073-11094, 11074-11094, 11115-11132, 11117-11132, 11155-11171, 11210-11228, 11210-11276, 11235-11276, 11290-11323, 11308-11323, 11384-11407, 11385-11443, 11428-11443, 11468-11529, 11542-11605, 11621-11636, 11621-11638, 11621-11668, 11652-11668, 11742-11808, 11742-11811, 11853-11881, 11853-11909, 11892-11912, 11924-11940, 11925-12226, 11953-12027, 12038-12226, 12238-12270, 12337-12531, 12337-12368, 12410-12448, 12465-12531, 12598-12642, 12598-12742, 12647-12742, 12758-12832, 12761-12832, 12862-12904, 13548-13627, 13551-13654, 13638-13674, 13688-13798, 13704-13798, 13813-13932, 13949-14064, 13951-13969, 13975-14064, 14077-14107, 14089-14107, 14126-14147, 14165-14221, 14166-14221, 14243-14298, 14243-14299, 14315-14336, 14316-14336, 14362-14414, 14432-14454, 14461-14514, 14465-14514, 14541-14815, 14541-14636, 14724-14746, 1400-14815, 14905-14951, 14916-14951, 15019-15039, 15022-15039, 15170-15185, 15200-15232, 15211-15268, 15244-15268, 15279-15295, 15279-15399, 15312-15343, 15350-15399, 15405-15460, 15492-15526, 15570-15586, 15633-15808, 15641-15657, 15643-15711, 15716-15765, 15771-15802, 16116-16144, 16116-16149, 16189-16206, 16189-16342, 16218-16240, 16254-16310, 16327-16352, 16377-16397, 16377-16400, 16407-16439, 16407-16440, 16461-16476, 16533-16548, 16755-16770, 16895-16920, 16905-16920, 16956-16984, 16956-17092, 17014-17034, 17135-17159, 17041-17062, 17077-17092, 17135-17159, 17227-17254, 17672-17795, 17675-17872, 17802-17817, 17857-17872, 17909-17945, 17909-17971, 17953-17971, 17954-17971, 17984-18061, 17985-18048, 18075-18117, 18087-18115, 18138-18160, 18176-18193, 18505-18555, 18506-18536, 18585-18600, 18658-18712, 18662-18762, 18720-18763, 18798-18864, 18871-18888, 18901-18940, 18925-18940, 18958-18983, 18958-19013, 19388-19460, 19467-19513, 19474-19505, 19531-19626, 19533-19626, 19649-19717, 19649-19726, 19731-19801, 19731-19842, 19815-19875, 19860-19951, 19887-19951, 19970-19985, 19970-20054, 19999-20024, 20037-20061, 20087-20102, 20109-20153, 20087-20207, 20172-20212, 20356-20438, 20248-20437, 20248-20264, 20470-20508, 20481-20507, 20571-20623, 20571-20644, 20685-20700, 20706-21032, 20706-20772, 20781-20859, 20869-20984, 20990-21033, 21065-21102, 21065-21263, 21092-21632, 21276-21500, 21517-21632, 21989-22034, 22059-22087, or 22164-22209 of an HSD17B13 nucleic acid having the nucleobase sequence of SEQ ID NO: 2.

[0126] In certain embodiments, compounds have at least an 8, 9, 10, 11, 12, 13, 14, 15, or 16 contiguous nucleobase portion complementary to an equal length portion within nucleobases 3095-3454, 3095-3140, 3152-3236, 3168-3183, 3248-3328, 3312-3328, 3334-3390, 3348-3390, 3401-3420, 3429-3451, 3429-3454, 3474-3719, 3474-3644, 3478-3494, 3505-3531, 3544-3559, 3568-3634, 3671-3736, 3676-3717, 3721-3799, 3741-3771, 3750-3770, 3782-3799, 3834-3849, 3834-4154, 3877-3897, 3902-3917, 3933-3967, 3933-3979, 3988-4005, 3988-4017, 4068-4091, 4103-4118, 4123-4155, 4133-4155, 4220-4240, 4220-4264, 4249-4264, 4222-4240, 4296-4311, 4360-4378, 4389-4427, 4389-4431, 4405-4449, 4476-4496, 4517-4588, 4517-4552, 4537-4552, 4572-4588, 4640-4678, 4640-4879, 4641-4667, 4862-4879, 4991-5006, 4991-5305, 5029-5098, 5046-5098, 5104-5120, 5121-5141, 5125-5141, 5156-5256, 5158-5217, 5223-5242, 5267-5319, 5268-5319, 5395-5950, 5646-5695, 5655-5858, 5712-5752, 5712-5777, 5758-5777, 5782-5797, 5782-5862, 5804-5862, 5870-5910, 5871-6005, 5870-5910, 5870-5911, 5916-6007, 5935-5950, 5974-6007, 6029-6048, 6029-6055, 6035-6164, 6084-6099, 6084-6104, 6134-6164, 6170-6248, 6170-6275, 6170-6277, 6191-6218, 6221-6243, 6246-6275, 6284-6350, 6284-6352, 6298-6372, 6357-6372, 6388-6406, 6422-6493, 6422-6497, 6426-6621, 6567-6758, 6567-6582, 6597-6653, 6626-6653, 6710-6779, 6784-6811, 6785-6800, 6795-6811, 6913-6930, 6914-6929, 6914-6930, 6915-6930, 7101-7138, 7101-7441, 7125-7145, 7426-7441, 7473-7494, 7473-7498, 7481-7498, 7526-7543, 7550-7565, 7550-7634, 7563-7699, 7643-7676, 7680-7698, 7680-7699, 7708-7723, 7751-7819, 7768-7796, 7828-7866, 7834-7969, 7938-7968, 7938-7969, 7973-7994, 8017-8032, 8039-8186, 8039-8065, 8040-8065, 8121-8156, 8125-8151, 8164-8185, 8164-8186, 8205-8297, 8205-8220, 8236-8252, 8236-8271, 8256-8294, 8279-8297, 8487-8502, 8487-8627, 8529-8579, 8587-8628, 8636-8732, 8643-8910, 8744-8762, 8786-8910, 8939-9027, 8939-8996, 9000-9027, 9057-9096, 9080-9230, 9110-9173, 9188-9240, 9256-9275, 9312-9365, 9372-9401, 9373-9394, 9410-9446, 9410-9491, 9476-9555, 9497-9555, 9588-9678, 9588-9681, 9712-9737, 9712-9742, 9751-9811, 9751-10040, 9887-9902, 9908-10017, 10025-10040, 10058-10079, 10112-10160, 10124-10160, 10138-10160, 10180-10227, 10180-10233, 10258-10279, 10292-10310, 10293-10310, 10335-10375, 10335-10538, 10380-10538, 10554-10569, 10584-10599, 10728-10745, 10831-10870, 10930-10946, 10931-10946, 10970-10993, 10971-11015, 1100-11015, 11030-11045, 11073-11094, 11074-11094, 11115-11132, 11117-11132, 11155-11171, 11210-11228, 11210-11276, 11235-11276, 11290-11323, 11308-11323, 11384-11407, 11385-11443, 11428-11443, 11468-11529, 11542-11605, 11621-11636, 11621-11638, 11621-11668, 11652-11668, 11742-11808, 11742-11811, 11853-11881, 11853-11909, 11892-11912, 11924-11940, 11925-12226, 11953-12027, 12038-12226, 12238-12270, 12337-12531, 12337-12368, 12410-12448, 12465-12531, 12598-12642, 12598-12742, 12647-12742, 12758-12832, 12761-12832, 12862-12904, 13548-13627, 13551-13654, 13638-13674, 13688-13798, 13704-13798, 13813-13932, 13949-14064, 13951-13969, 13975-14064, 14077-14107, 14089-14107, 14126-14147, 14165-14221, 14166-14221, 14243-14298, 14243-14299, 14315-14336, 14316-14336, 14362-14414, 14432-14454, 14461-14514, 14465-14514, 14541-14815, 14541-14636, 14724-14746, 1400-14815, 14905-14951, 14916-14951, 15019-15039, 15022-15039, 15170-15185, 15200-15232, 15211-15268, 15244-15268, 15279-15295, 15279-15399, 15312-15343, 15350-15399, 15405-15460, 15492-15526, 15570-15586, 15633-15808, 15641-15657, 15643-15711, 15716-15765, 15771-15802, 16116-16144, 16116-16149, 16189-16206, 16189-16342, 16218-16240, 16254-16310, 16327-16352, 16377-16397, 16377-16400, 16407-16439, 16407-16440, 16461-16476, 16533-16548, 16755-16770, 16895-16920, 16905-16920, 16956-16984, 16956-17092, 17014-17034, 17135-17159, 17041-17062, 17077-17092, 17135-17159, 17227-17254, 17672-17795, 17675-17872, 17802-17817, 17857-17872, 17909-17945, 17909-17971, 17953-17971, 17954-17971, 17984-18061, 17985-18048, 18075-18117, 18087-18115, 18138-18160, 18176-18193, 18505-18555, 18506-18536, 18585-18600, 18658-18712, 18662-18762, 18720-18763, 18798-18864, 18871-18888, 18901-18940, 18925-18940, 18958-18983, 18958-19013, 19388-19460, 19467-19513, 19474-19505, 19531-19626, 19533-19626, 19649-19717, 19649-19726, 19731-19801, 19731-19842, 19815-19875, 19860-19951, 19887-19951, 19970-19985, 19970-20054, 19999-20024, 20037-20061, 20087-20102, 20109-20153, 20087-20207, 20172-20212, 20356-20438, 20248-20437, 20248-20264, 20470-20508, 20481-20507, 20571-20623, 20571-20644, 20685-20700, 20706-21032, 20706-20772, 20781-20859, 20869-20984, 20990-21033, 21065-21102, 21065-21263, 21092-21632, 21276-21500, 21517-21632, 21989-22034, 22059-22087, or 22164-22209 of an HSD17B13 nucleic acid having the nucleobase sequence of SEQ ID NO: 2. In certain embodiments, these compounds are antisense compounds, oligomeric compounds, or oligonucleotides. In certain embodiments, the modified oligonucleotide consists of 10 to 30 linked nucleosides. In certain embodiments, the modified oligonucleotide consists of 16 to 30 linked nucleosides.

[0127] In certain embodiments, compounds have a nucleobase sequence complementary to nucleobases 1323-1338, 1600-1615, 1627-1642, or 1782-1797 of an HSD17B13 nucleic acid having the nucleobase sequence of SEQ ID NO: 1.

[0128] In certain embodiments, compounds have a nucleobase sequence comprising a portion of at least 8, 9, 10, 11, 12, 13, 14, 15, or 16 contiguous nucleobases complementary within an equal length portion of nucleobases 1323-1338, 1600-1615, 1627-1642, or 1782-1797 of an HSD17B13 nucleic acid having the nucleobase sequence of SEQ ID NO: 1. In certain embodiments, these compounds are antisense compounds, oligomeric compounds, or oligonucleotides. In certain embodiments, the modified oligonucleotide consists of 10 to 30 linked nucleosides. In certain embodiments, the modified oligonucleotide consists of 16 to 30 linked nucleosides.

[0129] In certain embodiments, compounds have a nucleobase sequence complementary to nucleobases 3439-3454, 3552-3567, 3754-3769, 3963-3978, 4406-4421, 4123-4138, 4139-4154, 4991-5006, 5045-5060, 5662-5677, 6476-6491, 6478-6493, 17992-18007, 21138-21153, 21415-21430, 21442-21457, or 21597-21612 of an HSD17B13 nucleic acid having the nucleobase sequence of SEQ ID NO: 2.

[0130] In certain embodiments, compounds have a nucleobase sequence comprising a portion of at least 8, 9, 10, 11, 12, 13, 14, 15, or 16 contiguous nucleobases complementary within an equal length portion of nucleobases 3439-3454, 3552-3567, 3754-3769, 3963-3978, 4406-4421, 4123-4138, 4139-4154, 4991-5006, 5045-5060, 5662-5677, 6476-6491, 6478-6493, 17992-18007, 21138-21153, 21415-21430, 21442-21457, or 21597-21612 of an HSD17B13 nucleic acid having the nucleobase sequence of SEQ ID NO: 2. In certain embodiments, these compounds are antisense compounds, oligomeric compounds, or oligonucleotides. In certain embodiments, the modified oligonucleotide consists of 10 to 30 linked nucleosides. In certain embodiments, the modified oligonucleotide consists of 16 to 30 linked nucleosides.

[0131] In certain embodiments, any of the foregoing modified oligonucleotides has at least one modified internucleoside linkage, at least one modified sugar, and/or at least one modified nucleobase.

[0132] In certain embodiments, at least one nucleoside of any of the foregoing modified oligonucleotides comprises a modified sugar. In certain embodiments, the modified sugar comprises a 2′-O-methoxyethyl group. In certain embodiments, the modified sugar is a bicyclic sugar, such as a 4′-CH(CH3)-O-2′ group, a 4′-CH2-O-2′ group, or a 4′-(CH2)2-O-2′group.

[0133] In certain embodiments, at least one internucleoside linkage of the modified oligonucleotide comprises a modified internucleoside linkage, such as a phosphorothioate internucleoside linkage.

[0134] In certain embodiments, at least one nucleobase of any of the foregoing modified oligonucleotides comprises a modified nucleobase, such as 5-methylcytosine.

[0135] In certain embodiments, any of the foregoing modified oligonucleotides has:
[0136] a gap segment consisting of linked deoxynucleosides;
[0137] a 5′ wing segment consisting of linked nucleosides; and
[0138] a 3′ wing segment consisting of linked nucleosides;
   wherein the gap segment is positioned between the 5′ wing segment and the 3′ wing segment and wherein each nucleoside of each wing segment comprises a modified sugar. In certain embodiments, the modified oligonucleotide consists of 12 to 30 linked nucleosides and has a nucleobase sequence comprising the sequence recited in any one of SEQ ID NOs: 8-2896. In certain embodiments, the modified oligonucleotide is 16 to 30 linked nucleosides in length having a nucleobase sequence comprising the nucleobase sequence recited in any one of SEQ ID NOs: 8-2896. In certain embodiments, the modified oligonucleotide is 16 linked nucleosides in length having a nucleobase sequence consisting of the sequence recited in any one of SEQ ID NOs: 8-2896.

[0139] In certain embodiments, a compound comprises or consists of a modified oligonucleotide consisting of 16 to 80 linked nucleobases and having a nucleobase sequence comprising the nucleobase sequence recited in any one of 8-2896, wherein the modified oligonucleotide has:
[0140] a gap segment consisting of linked 2′-deoxynucleosides;
[0141] a 5′ wing segment consisting of linked nucleosides; and
[0142] a 3′ wing segment consisting of linked nucleosides;

[0143] wherein the gap segment is positioned between the 5′ wing segment and the 3′ wing segment and wherein each nucleoside of each wing segment comprises a modified sugar. In certain embodiments, the modified oligonucleotide consists of 16 to 30 linked nucleosides. In certain embodiments, the modified oligonucleotide consists of 16 linked nucleosides

[0144] In certain embodiments, a compound comprises or consists of a modified oligonucleotide 12-30 linked nucleobases in length having a nucleobase sequence comprising the sequence recited in any one of SEQ ID NOs: 286, 817, 983, 1215, 747, 43, 355, 1602, 201, 734, 1249, 208, 513, 1449, 1448, and 1595, wherein the modified oligonucleotide has:

[0145] a gap segment consisting of ten linked 2′-deoxynucleosides;

[0146] a 5′ wing segment consisting of three linked nucleosides; and

[0147] a 3′ wing segment consisting of three linked nucleosides;

wherein the gap segment is positioned between the 5′ wing segment and the 3′ wing segment, wherein each nucleoside of each wing segment comprises a cEt sugar; wherein each internucleoside linkage is a phosphorothioate linkage and wherein each cytosine is a 5-methylcytosine. In certain embodiments, the modified oligonucleotide consists of 16-30 linked nucleosides. In certain embodiments, the modified oligonucleotide consists of 16 linked nucleosides.

[0148] In certain embodiments, a compound comprises or consists of a modified oligonucleotide 12-30 linked nucleobases in length having a nucleobase sequence comprising the sequence recited in any one of SEQ ID NOs: 819, wherein the modified oligonucleotide has:

[0149] a gap segment consisting of nine linked 2′-deoxynucleosides;

[0150] a 5′ wing segment consisting of three linked nucleosides; and

[0151] a 3′ wing segment consisting of four linked nucleosides;

wherein the gap segment is positioned between the 5′ wing segment and the 3′ wing segment, wherein each nucleoside of the 5′ wing segment comprises a cEt sugar; wherein the sugar residues of the nucleosides of the 3′ wing segment are 5′-cEt-cEt-cEt-MOE-3′; wherein each internucleoside linkage is a phosphorothioate linkage and wherein each cytosine is a 5-methylcytosine. In certain embodiments, the modified oligonucleotide consists of 16-30 linked nucleosides. In certain embodiments, the modified oligonucleotide consists of 16 linked nucleosides.

[0152] In certain embodiments, a compound comprises or consists of a modified oligonucleotide 12-30 linked nucleobases in length having a nucleobase sequence comprising the sequence recited in any one of SEQ ID NOs: 1595, wherein the modified oligonucleotide has:

[0153] a gap segment consisting of ten linked nucleosides;

[0154] a 5′ wing segment consisting of three linked nucleosides; and

[0155] a 3′ wing segment consisting of four linked nucleosides;

wherein the gap segment is positioned between the 5′ wing segment and the 3′ wing segment and wherein the gap segment consists of 5′-one deoxy, one 2′-O-methyl nucleoside, and eight deoxynucleosides-3′, wherein each nucleoside of each of the wing segments comprises a cEt sugar; wherein each internucleoside linkage is a phosphorothioate linkage and wherein each cytosine is a 5-methylcytosine. In certain embodiments, the modified oligonucleotide consists of 16-30 linked nucleosides. In certain embodiments, the modified oligonucleotide consists of 16 linked nucleosides.

[0156] In any of the foregoing embodiments, the compound or oligonucleotide can be at least 85%, at least 90%, at least 95%, at least 98%, at least 99%, or 100% complementary to a nucleic acid encoding HSD17B13.

[0157] In any of the foregoing embodiments, the compound can be single-stranded. In certain embodiments, the compound comprises deoxyribonucleotides. In certain embodiments, the compound is double-stranded. In certain embodiments, the compound is double-stranded and comprises ribonucleotides. In any of the foregoing embodiments, the compound can be an antisense compound or oligomeric compound.

[0158] In any of the foregoing embodiments, the compound can consist of 8 to 80, 10 to 30, 12 to 50, 13 to 30, 13 to 50, 14 to 30, 14 to 50, 15 to 30, 15 to 50, 16 to 30, 16 to 50, 17 to 30, 17 to 50, 18 to 22, 18 to 24, 18 to 30, 18 to 50, 19 to 22, 19 to 30, 19 to 50, or 20 to 30 linked nucleosides. In certain embodiments, the compound comprises or consists of an oligonucleotide.

[0159] In certain embodiments, a compound comprises a modified oligonucleotide described herein and a conjugate group. In certain embodiments, the conjugate group is linked to the modified oligonucleotide at the 5′ end of the modified oligonucleotide. In certain embodiments, the conjugate group is linked to the modified oligonucleotide at the 3′ end of the modified oligonucleotide. In certain embodiments, the conjugate group comprises at least one N-Acetylgalactosamine (GalNAc), at least two N-Acetylgalactosamines (GalNAcs), or at least three N-Acetylgalactosamines (GalNAcs).

[0160] In certain embodiments, compounds or compositions provided herein comprise a pharmaceutically acceptable salt of the modified oligonucleotide. In certain embodiments, the salt is a sodium salt. In certain embodiments, the salt is a potassium salt.

[0161] In certain embodiments, a compound provided herein is according to the following chemical structure:

[chemical structure]

or a salt thereof. In certain embodiments, the compound is a sodium salt. In certain embodiments, the compound is a potassium salt.

[0162] In certain embodiments, a compound provided herein is according to the following chemical structure:

[chemical structure]

[0163] In certain embodiments, a compound provided herein is according to the following chemical structure:

[chemical structure]

or a salt thereof. In certain embodiments, the compound is a sodium salt. In certain embodiments, the compound is a potassium salt.

[0164] In certain embodiments, a compound provided herein is according to the following chemical structure:

[chemical structure]

[0165] In certain embodiments, a compound provided herein is according to the following chemical structure:

[chemical structure]

or a salt thereof. In certain embodiments, the compound is a sodium salt. In certain embodiments, the compound is a potassium salt.

[0166] In certain embodiments, a compound provided herein is according to the following chemical structure:

[chemical structure]

[0167] In certain embodiments, a compound provided herein is according to the following chemical structure:

[chemical structure]

or a salt thereof. In certain embodiments, the compound is a sodium salt. In certain embodiments, the compound is a potassium salt.

[0168] In certain embodiments, a compound provided herein is according to the following chemical structure:

[chemical structure]

[0169] In certain embodiments, a compound provided herein is according to the following chemical structure:

[chemical structure]

or a salt thereof. In certain embodiments, the compound is a sodium salt. In certain embodiments, the compound is a potassium salt.

[0170] In certain embodiments, a compound provided herein is according to the following chemical structure:

[chemical structure]

[0171] In certain embodiments, a compound provided herein is according to the following chemical structure:

[chemical structure]

or a salt thereof. In certain embodiments, the compound is a sodium salt. In certain embodiments, the compound is a potassium salt.

[0172] In certain embodiments, a compound provided herein is according to the following chemical structure:

[chemical structure]

[0173] In certain embodiments, a compound provided herein is according to the following chemical structure:

[chemical structure]

or a salt thereof. In certain embodiments, the compound is a sodium salt. In certain embodiments, the compound is a potassium salt.

[0174] In certain embodiments, a compound provided herein is according to the following chemical structure:

[chemical structure]

[0175] In certain embodiments, a compound provided herein is according to the following chemical structure:

[chemical structure]

or a salt thereof. In certain embodiments, the compound is a sodium salt. In certain embodiments, the compound is a potassium salt.

[0176] In certain embodiments, a compound provided herein is according to the following chemical structure:

[chemical structure]

[0177] In certain embodiments, a compound provided herein is according to the following chemical structure:

[chemical structure]

or a salt thereof. In certain embodiments, the compound is a sodium salt. In certain embodiments, the compound is a potassium salt.

[0178] In certain embodiments, a compound provided herein is according to the following chemical structure:

[chemical structure]

[0179] In certain embodiments, a compound provided herein is according to the following chemical structure:

[chemical structure]

or a salt thereof. In certain embodiments, the compound is a sodium salt. In certain embodiments, the compound is a potassium salt.

[0180] In certain embodiments, a compound provided herein is according to the following chemical structure:

[chemical structure]

[0181] In certain embodiments, a compound provided herein is according to the following chemical structure:

[chemical structure]

or a salt thereof. In certain embodiments, the compound is a sodium salt. In certain embodiments, the compound is a potassium salt.

[0182] In certain embodiments, a compound provided herein is according to the following chemical structure:

[chemical structure]

[0183] In certain embodiments, a compound provided herein is according to the following chemical structure:

[chemical structure]

or a salt thereof. In certain embodiments, the compound is a sodium salt. In certain embodiments, the compound is a potassium salt.

[0184] In certain embodiments, a compound provided herein is according to the following chemical structure:

[chemical structure]

[0185] In certain embodiments, a compound provided herein is according to the following chemical structure:

[chemical structure]

or a salt thereof. In certain embodiments, the compound is a sodium salt. In certain embodiments, the compound is a potassium salt.

[0186] In certain embodiments, a compound provided herein is according to the following chemical structure:

[chemical structure]

[0187] In certain embodiments, a compound provided herein is according to the following chemical structure:

[chemical structure]

or a salt thereof. In certain embodiments, the compound is a sodium salt. In certain embodiments, the compound is a potassium salt.

[0188] In certain embodiments, a compound provided herein is according to the following chemical structure:

[chemical structure]

[0189] In certain embodiments, a compound provided herein is according to the following chemical structure:

[chemical structure]

or a salt thereof. In certain embodiments, the compound is a sodium salt. In certain embodiments, the compound is a potassium salt.

[0190] In certain embodiments, a compound provided herein is according to the following chemical structure:

[chemical structure]

[0191] In certain embodiments, a compound provided herein is according to the following chemical structure:

[chemical structure]

or a salt thereof. In certain embodiments, the compound is a sodium salt. In certain embodiments, the compound is a potassium salt.

[0192] In certain embodiments, a compound provided herein is according to the following chemical structure:

[chemical structure]

[0193] In certain embodiments, a compound provided herein is according to the following chemical structure:

[chemical structure]

or a salt thereof. In certain embodiments, the compound is a sodium salt. In certain embodiments, the compound is a potassium salt.

[0194] In certain embodiments, a compound provided herein is according to the following chemical structure:

[chemical structure]

[0195] In certain embodiments, a compound provided herein is according to the following chemical structure:

[chemical structure]

or a salt thereof. In certain embodiments, the compound is a sodium salt. In certain embodiments, the compound is a potassium salt.

[0196] In certain embodiments, a compound provided herein is according to the following chemical structure:

[chemical structure]

[0197] Under certain conditions, certain compounds disclosed herein act as acids. Although such compounds may be drawn or described in protonated (free acid) form, or ionized and in association with a cation (salt) form, aqueous solutions of such compounds exist in equilibrium among such forms. For example, a phosphate linkage of an oligonucleotide in aqueous solution exists in equilibrium among free acid, anion and salt forms. Unless otherwise indicated, compounds described herein are intended to include all such forms. Moreover, certain oligonucleotides have several such linkages, each of which is in equilibrium. Thus, oligonucleotides in solution exist in an ensemble of forms at multiple positions all at equilibrium. The term “oligonucleotide” is intended to include all such forms. Drawn structures necessarily depict a single form. Nevertheless, unless otherwise indicated, such drawings are likewise intended to include corresponding forms. Herein, a structure depicting the free acid of a compound followed by the term “or a salt thereof” expressly includes all such forms that may be fully or partially protonated/de-protonated/in association with a cation. In certain instances, one or more specific cation is identified.

[0198] In certain embodiments, modified oligonucleotides or oligomeric compounds are in aqueous solution with sodium. In certain embodiments, modified oligonucleotides or oligomeric compounds are in aqueous solution with potassium. In certain embodiments, modified oligonucleotides or oligomeric compounds are in PBS. In certain embodiments, modified oligonucleotides or oligomeric compounds are in water. In certain such embodiments, the pH of the solution is adjusted with NaOH and/or HCl to achieve a desired pH. In certain embodiments, the compounds or compositions as described herein are active by virtue of having at least one of an in vitro IC₅₀ of less than 2 μM, less than 1.5 μM, less than 1 μM, less than 0.9 μM, less than 0.8 μM, less than 0.7 μM, less than 0.6 μM, less than 0.5 μM, less than 0.4 μM, less than 0.3 μM, less than 0.2 μM, less than 0.1 μM, less than 0.05 μM, less than 0.04 μM, less than 0.03 μM, less than 0.02 μM, or less than 0.01 μM.

[0199] In certain embodiments, the compounds or compositions as described herein are highly tolerable as demonstrated by having at least one of an increase in alanine transaminase (ALT) or aspartate transaminase (AST) value of no more than 4 fold, 3 fold, or 2 fold over control animals, or an increase in liver, spleen, or kidney weight of no more than 30%, 20%, 15%, 12%, 10%, 5%, or 2% compared to control animals. In certain embodiments, the compounds or compositions as described herein are highly tolerable as demonstrated by having no increase of ALT or AST over control animals. In certain embodiments, the compounds or compositions as described herein are highly tolerable as demonstrated by having no increase in liver, spleen, or kidney weight over control animals.

[0200] Certain embodiments provide a composition comprising the compound of any of the aforementioned embodiments or any pharmaceutically acceptable salt thereof and at least one of a pharmaceutically acceptable carrier or diluent. In certain embodiments, the composition has a viscosity less than about 40 centipoise (cP), less than about 30 centipose (cP), less than about 20 centipose (cP), less than about 15 centipose (cP), or less than about 10 centipose (cP). In certain embodiments, the composition having any of the aforementioned viscosities comprises a compound provided herein at a concentration of about 100 mg/mL, about 125 mg/mL, about 150 mg/mL, about 175 mg/mL, about 200 mg/mL, about 225 mg/mL, about 250 mg/mL, about 275 mg/mL, or about 300 mg/mL. In certain embodiments, the composition having any of the aforementioned viscosities and/or compound concentrations has a temperature of room temperature, or about 20° C., about 21° C., about 22° C., about 23° C., about 24° C., about 25° C., about 26° C., about 27° C., about 28° C., about 29° C., or about 30° C.

[0201] Non-limiting numbered embodiments include:

[0202] Embodiment 1: Certain embodiments provide a compound comprising a modified oligonucleotide consisting of 8 to 80 linked nucleosides and having a nucleobase sequence comprising at least 8, at least 9, at least 10, at least 11, or at least 12 contiguous nucleobases of any of the nucleobase sequences of SEQ ID NOs: 8-2896. Certain embodiments provide a compound comprising a modified oligonucleotide consisting of 12 to 30 linked nucleosides, wherein wherein the modified oligonucleotide has a nucleobase sequence comprising at least 8, at least 9, at least 10, at least 11, or at least 12 contiguous nucleobases of any of the nucleobase sequences of SEQ ID NOs: 8-2896.

[0203] Embodiment 2: Certain embodiments provide a compound comprising modified oligonucleotide consisting of 8 to 80 linked nucleosides and having a nucleobase sequence comprising the nucleobase sequence of any one of SEQ ID NOs: 8-2896. Certain embodiments provide a compound comprising modified oligonucleotide consisting of 12 to 30 linked nucleosides and having a nucleobase sequence comprising the nucleobase sequence of any one of SEQ ID NOs: 8-2896.

[0204] Embodiment 3: Certain embodiments provide a compound comprising a modified oligonucleotide having a nucleobase sequence consisting of any one of SEQ ID NOs: 8-2896.

[0205] Embodiment 4: Certain embodiments provide a compound comprising modified oligonucleotide consisting of 8 to 80 linked nucleosides, or consisting of 12 to 30 linked nucleosides, wherein the modified oligonucleotide has a nucleobase sequence comprising a portion of at least 8 contiguous nucleobases complementary to an equal length portion of nucleobases 3095-3454, 3095-3140, 3152-3236, 3168-3183, 3248-3328, 3312-3328, 3334-3390, 3348-3390, 3401-3420, 3429-3451, 3429-3454, 3474-3719, 3474-3644, 3478-3494, 3505-3531, 3544-3559, 3568-3634, 3671-3736, 3676-3717, 3721-3799, 3741-3771, 3750-3770, 3782-3799, 3834-3849, 3834-4154, 3877-3897, 3902-3917, 3933-3967, 3933-3979, 3988-4005, 3988-4017, 4068-4091, 4103-4118, 4123-4155, 4133-4155, 4220-4240, 4220-4264, 4249-4264, 4222-4240, 4296-4311, 4360-4378, 4389-4427, 4389-4431, 4405-4449, 4476-4496, 4517-4588, 4517-4552, 4537-4552, 4572-4588, 4640-4678, 4640-4879, 4641-4667, 4862-4879, 4991-5006, 4991-5305, 5029-5098, 5046-5098, 5104-5120, 5121-5141, 5125-5141, 5156-5256, 5158-5217, 5223-5242, 5267-5319, 5268-5319, 5395-5950, 5646-5695, 5655-5858, 5712-5752, 5712-5777, 5758-5777, 5782-5797, 5782-5862, 5804-5862, 5870-5910, 5871-6005, 5870-5910, 5870-5911, 5916-6007, 5935-5950, 5974-6007, 6029-6048, 6029-6055, 6035-6164, 6084-6099, 6084-6104, 6134-6164, 6170-6248, 6170-6275, 6170-6277, 6191-6218, 6221-6243, 6246-6275, 6284-6350, 6284-6352, 6298-6372, 6357-6372, 6388-6406, 6422-6493, 6422-6497, 6426-6621, 6567-6758, 6567-6582, 6597-6653, 6626-6653, 6710-6779, 6784-6811, 6785-6800, 6795-6811, 6913-6930, 6914-6929, 6914-6930, 6915-6930, 7101-7138, 7101-7441, 7125-7145, 7426-7441, 7473-7494, 7473-7498, 7481-7498, 7526-7543, 7550-7565, 7550-7634, 7563-7699, 7643-7676, 7680-7698, 7680-7699, 7708-7723, 7751-7819, 7768-7796, 7828-7866, 7834-7969, 7938-7968, 7938-7969, 7973-7994, 8017-8032, 8039-8186, 8039-8065, 8040-8065, 8121-8156, 8125-8151, 8164-8185, 8164-8186, 8205-8297, 8205-8220, 8236-8252, 8236-8271, 8256-8294, 8279-8297, 8487-8502, 8487-8627, 8529-8579, 8587-8628, 8636-8732, 8643-8910, 8744-8762, 8786-8910, 8939-9027, 8939-8996, 9000-9027, 9057-9096, 9080-9230, 9110-9173, 9188-9240, 9256-9275, 9312-9365, 9372-9401, 9373-9394, 9410-9446, 9410-9491, 9476-9555, 9497-9555, 9588-9678, 9588-9681, 9712-9737, 9712-9742, 9751-9811, 9751-10040, 9887-9902, 9908-10017, 10025-10040, 10058-10079, 10112-10160, 10124-10160, 10138-10160, 10180-10227, 10180-10233, 10258-10279, 10292-10310, 10293-10310, 10335-10375, 10335-10538, 10380-10538, 10554-10569, 10584-10599, 10728-10745, 10831-10870, 10930-10946, 10931-10946, 10970-10993, 10971-11015, 1100-11015, 11030-11045, 11073-11094, 11074-11094, 11115-11132, 11117-11132, 11155-11171, 11210-11228, 11210-11276, 11235-11276, 11290-11323, 11308-11323, 11384-11407, 11385-11443, 11428-11443, 11468-11529, 11542-11605, 11621-11636, 11621-11638, 11621-11668, 11652-11668, 11742-11808, 11742-11811, 11853-11881, 11853-11909, 11892-11912, 11924-11940, 11925-12226, 11953-12027, 12038-12226, 12238-12270, 12337-12531, 12337-12368, 12410-12448, 12465-12531, 12598-12642, 12598-12742, 12647-12742, 12758-12832, 12761-12832, 12862-12904, 13548-13627, 13551-13654, 13638-13674, 13688-13798, 13704-13798, 13813-13932, 13949-14064, 13951-13969, 13975-14064, 14077-14107, 14089-14107, 14126-14147, 14165-14221, 14166-14221, 14243-14298, 14243-14299, 14315-14336, 14316-14336, 14362-14414, 14432-14454, 14461-14514, 14465-14514, 14541-14815, 14541-14636, 14724-14746, 1400-14815, 14905-14951, 14916-14951, 15019-15039, 15022-15039, 15170-15185, 15200-15232, 15211-15268, 15244-15268, 15279-15295, 15279-15399, 15312-15343, 15350-15399, 15405-15460, 15492-15526, 15570-15586, 15633-15808, 15641-15657, 15643-15711, 15716-15765, 15771-15802, 16116-16144, 16116-16149, 16189-16206, 16189-16342, 16218-16240, 16254-16310, 16327-16352, 16377-16397, 16377-16400, 16407-16439, 16407-16440, 16461-16476, 16533-16548, 16755-16770, 16895-16920, 16905-16920, 16956-16984, 16956-17092, 17014-17034, 17135-17159, 17041-17062, 17077-17092, 17135-17159, 17227-17254, 17672-17795, 17675-17872, 17802-17817, 17857-17872, 17909-17945, 17909-17971, 17953-17971, 17954-17971, 17984-18061, 17985-18048, 18075-18117, 18087-18115, 18138-18160, 18176-18193, 18505-18555, 18506-18536, 18585-18600, 18658-18712, 18662-18762, 18720-18763, 18798-18864, 18871-18888, 18901-18940, 18925-18940, 18958-18983, 18958-19013, 19388-19460, 19467-19513, 19474-19505, 19531-19626, 19533-19626, 19649-19717, 19649-19726, 19731-19801, 19731-19842, 19815-19875, 19860-19951, 19887-19951, 19970-19985, 19970-20054, 19999-20024, 20037-20061, 20087-20102, 20109-20153, 20087-20207, 20172-20212, 20356-20438, 20248-20437, 20248-20264, 20470-20508, 20481-20507, 20571-20623, 20571-20644, 20685-20700, 20706-21032, 20706-20772, 20781-20859, 20869-20984, 20990-21033, 21065-21102, 21065-21263, 21092-21632, 21276-21500, 21517-21632, 21989-22034, 22059-22087, or 22164-22209 of SEQ ID NO: 2, and wherein the nucleobase sequence of the modified oligonucleotide is at least 85%, at least 90%, at least 95%, or 100% complementary to SEQ ID NO: 2.

[0206] Embodiment 5: Certain embodiments provide a compound comprising a modified oligonucleotide consisting of 8 to 80 linked nucleosides, wherein the modified oligonucleotide has a nucleobase sequence complementary within nucleobases 3095-3454, 3095-3140, 3152-3236, 3168-3183, 3248-3328, 3312-3328, 3334-3390, 3348-3390, 3401-3420, 3429-3451, 3429-3454, 3474-3719, 3474-3644, 3478-3494, 3505-3531, 3544-3559, 3568-3634, 3671-3736, 3676-3717, 3721-3799, 3741-3771, 3750-3770, 3782-3799, 3834-3849, 3834-4154, 3877-3897, 3902-3917, 3933-3967, 3933-3979, 3988-4005, 3988-4017, 4068-4091, 4103-4118, 4123-4155, 4133-4155, 4220-4240, 4220-4264, 4249-4264, 4222-4240, 4296-4311, 4360-4378, 4389-4427, 4389-4431, 4405-4449, 4476-4496, 4517-4588, 4517-4552, 4537-4552, 4572-4588, 4640-4678, 4640-4879, 4641-4667, 4862-4879, 4991-5006, 4991-5305, 5029-5098, 5046-5098, 5104-5120, 5121-5141, 5125-5141, 5156-5256, 5158-5217, 5223-5242, 5267-5319, 5268-5319, 5395-5950, 5646-5695, 5655-5858, 5712-5752, 5712-5777, 5758-5777, 5782-5797, 5782-5862, 5804-5862, 5870-5910, 5871-6005, 5870-5910, 5870-5911, 5916-6007, 5935-5950, 5974-6007, 6029-6048, 6029-6055, 6035-6164, 6084-6099, 6084-6104, 6134-6164, 6170-6248, 6170-6275, 6170-6277, 6191-6218, 6221-6243, 6246-6275, 6284-6350, 6284-6352, 6298-6372, 6357-6372, 6388-6406, 6422-6493, 6422-6497, 6426-6621, 6567-6758, 6567-6582, 6597-6653, 6626-6653, 6710-6779, 6784-6811, 6785-6800, 6795-6811, 6913-6930, 6914-6929, 6914-6930, 6915-6930, 7101-7138, 7101-7441, 7125-7145, 7426-7441, 7473-7494, 7473-7498, 7481-7498, 7526-7543, 7550-7565, 7550-7634, 7563-7699, 7643-7676, 7680-7698, 7680-7699, 7708-7723, 7751-7819, 7768-7796, 7828-7866, 7834-7969, 7938-7968, 7938-7969, 7973-7994, 8017-8032, 8039-8186, 8039-8065, 8040-8065, 8121-8156, 8125-8151, 8164-8185, 8164-8186, 8205-8297, 8205-8220, 8236-8252, 8236-8271, 8256-8294, 8279-8297, 8487-8502, 8487-8627, 8529-8579, 8587-8628, 8636-8732, 8643-8910, 8744-8762, 8786-8910, 8939-9027, 8939-8996, 9000-9027, 9057-9096, 9080-9230, 9110-9173, 9188-9240, 9256-9275, 9312-9365, 9372-9401, 9373-9394, 9410-9446, 9410-9491, 9476-9555, 9497-9555, 9588-9678, 9588-9681, 9712-9737, 9712-9742, 9751-9811, 9751-10040, 9887-9902, 9908-10017, 10025-10040, 10058-10079, 10112-10160, 10124-10160, 10138-10160, 10180-10227, 10180-10233, 10258-10279, 10292-10310, 10293-10310, 10335-10375, 10335-10538, 10380-10538, 10554-10569, 10584-10599, 10728-10745, 10831-10870, 10930-10946, 10931-10946, 10970-10993, 10971-11015, 1100-11015, 11030-11045, 11073-11094, 11074-11094, 11115-11132, 11117-11132, 11155-11171, 11210-11228, 11210-11276, 11235-11276, 11290-11323, 11308-11323, 11384-11407, 11385-11443, 11428-11443, 11468-11529, 11542-11605, 11621-11636, 11621-11638, 11621-11668, 11652-11668, 11742-11808, 11742-11811, 11853-11881, 11853-11909, 11892-11912, 11924-11940, 11925-12226, 11953-12027, 12038-12226, 12238-12270, 12337-12531, 12337-12368, 12410-12448, 12465-12531, 12598-12642, 12598-12742, 12647-12742, 12758-12832, 12761-12832, 12862-12904, 13548-13627, 13551-13654, 13638-13674, 13688-13798, 13704-13798, 13813-13932, 13949-14064, 13951-13969, 13975-14064, 14077-14107, 14089-14107, 14126-14147, 14165-14221, 14166-14221, 14243-14298, 14243-14299, 14315-14336, 14316-14336, 14362-14414, 14432-14454, 14461-14514, 14465-14514, 14541-14815, 14541-14636, 14724-14746, 1400-14815, 14905-14951, 14916-14951, 15019-15039, 15022-15039, 15170-15185, 15200-15232, 15211-15268, 15244-15268, 15279-15295, 15279-15399, 15312-15343, 15350-15399, 15405-15460, 15492-15526, 15570-15586, 15633-15808, 15641-15657, 15643-15711, 15716-15765, 15771-15802, 16116-16144, 16116-16149, 16189-16206, 16189-16342, 16218-16240, 16254-16310, 16327-16352, 16377-16397, 16377-16400, 16407-16439, 16407-16440, 16461-16476, 16533-16548, 16755-16770, 16895-16920, 16905-16920, 16956-16984, 16956-17092, 17014-17034, 17135-17159, 17041-17062, 17077-17092, 17135-17159, 17227-17254, 17672-17795, 17675-17872, 17802-17817, 17857-17872, 17909-17945, 17909-17971, 17953-17971, 17954-17971, 17984-18061, 17985-18048, 18075-18117, 18087-18115, 18138-18160, 18176-18193, 18505-18555, 18506-18536, 18585-18600, 18658-18712, 18662-18762, 18720-18763, 18798-18864, 18871-18888, 18901-18940, 18925-18940, 18958-18983, 18958-19013, 19388-19460, 19467-19513, 19474-19505, 19531-19626, 19533-19626, 19649-19717, 19649-19726, 19731-19801, 19731-19842, 19815-19875, 19860-19951, 19887-19951, 19970-19985, 19970-20054, 19999-20024, 20037-20061, 20087-20102, 20109-20153, 20087-20207, 20172-20212, 20356-20438, 20248-20437, 20248-20264, 20470-20508, 20481-20507, 20571-20623, 20571-20644, 20685-20700, 20706-21032, 20706-20772, 20781-20859, 20869-20984, 20990-21033, 21065-21102, 21065-21263, 21092-21632, 21276-21500, 21517-21632, 21989-22034, 22059-22087, or 22164-22209 of SEQ ID NO: 2, and wherein said modified oligonucleotide is at least 85%, at least 90%, at least 95%, or 100% complementary to SEQ ID NO: 2.

[0207] Embodiment 6: Certain embodiments provide a compound comprising a modified oligonucleotide consisting of 8 to 80 linked nucleosides, wherein the modified oligonucleotide has a nucleobase sequence comprising a portion of at least 8 contiguous nucleobases 100% complementary to an equal length portion of nucleobases 1-46, 58-142, 1-142, 74-89, 154-197, 154-234, 200-232, 218-234, 240-345, 254-269, 354-746, 354-830, 519-534, 565-580, 603-628, 693-716, 734-750, 734-830, 749-828, 835-862, 835-957, 966-1044, 1017-1043, 1054-1106, 1055-1070, 1075-1169, 1074-1132, 1136-1169, 1175-1218, 1180-1217, 1250-1292, 1251-1279, 1296-1146, 1296-1448, 1308-1448, 1461-1481, 1461-1519, 1461-1647, 1461-1646, 1483-1535, 1538-1646, 1544-1561, 1597-1645, 1654-1685, 1654-1817, 1702-1817, 1705-1741, 1748-2211, 2174-2219, 2240-2272, 2244-2272, 2349-2370, 2350-2371, or 2378-2394 of SEQ ID NO: 1, and wherein the nucleobase sequence of the modified oligonucleotide is at least 85%, at least 90%, at least 95%, or 100% complementary to SEQ ID NO: 1.

[0208] Embodiment 7: Certain embodiments provide a compound comprising a modified oligonucleotide consisting of 8 to 80 linked nucleosides, wherein the modified oligonucleotide has a nucleobase sequence complementary within nucleobases 1-46, 58-142, 1-142, 74-89, 154-197, 154-234, 200-232, 218-234, 240-345, 254-269, 354-746, 354-830, 519-534, 565-580, 603-628, 693-716, 734-750, 734-830, 749-828, 835-862, 835-957, 966-1044, 1017-1043, 1054-1106, 1055-1070, 1075-1169, 1074-1132, 1136-1169, 1175-1218, 1180-1217, 1250-1292, 1251-1279, 1296-1146, 1296-1448, 1308-1448, 1461-1481, 1461-1519, 1461-1647, 1461-1646, 1483-1535, 1538-1646, 1544-1561, 1597-1645, 1654-1685, 1654-1817, 1702-1817, 1705-1741, 1748-2211, 2174-2219, 2240-2272, 2244-2272, 2349-2370, 2350-2371, or 2378-2394 of SEQ ID NO: 1, and wherein said modified oligonucleotide is at least 85%, at least 90%, at least 95%, or 100% complementary to SEQ ID NO: 1.

[0209] Embodiment 8: Certain embodiments provide a compound comprising a modified oligonucleotide consisting of 12 to 30 linked nucleosides, wherein the modified oligonucleotide has a nucleobase sequence comprising a portion of at least 8, at least 9, at least 10, at least 11, at least 12, at least 13, at least 14, at least 15, at least 16 contiguous nucleobases 100% complementary to an equal length portion of nucleobases 3439-3454, 3552-3567, 3754-3769, 3963-3978, 4406-4421, 4123-4138, 4139-4154, 4991-5006, 5045-5060, 5662-5677, 6476-6491, 6478-6493, 17992-18007, 21138-21153, 21415-21430, 21442-21457, or 21597-21612 of SEQ ID NO: 2, and wherein the nucleobase sequence of the modified oligonucleotide is at least 85%, at least 90%, at least 95%, or 100% complementary to SEQ ID NO: 2.

[0210] Embodiment 9: Certain embodiments provide a compound comprising a modified oligonucleotide consisting of 12 to 30 linked nucleosides, wherein the modified oligonucleotide has a nucleobase sequence comprising any one of SEQ ID NOs: 286, 817, 983, 1215, 747, 43, 355, 1602, 201, 734, 1249, 208, 513, 1449, 1448, 1595, and 819.

[0211] Embodiment 10: Certain embodiments provide a compound comprising a modified oligonucleotide having a nucleobase sequence consisting of any one of SEQ ID NO: 286, 817, 983, 1215, 747, 43, 355, 1602, 201, 734, 1249, 208, 513, 1449, 1448, 1595, and 819.

[0212] Embodiment 11: Certain embodiments provide the compound of embodiments 1-6, wherein the oligonucleotide is at least 80%, at least 85%, at least 90%, at least 95% or 100% complementary to SEQ ID NO: 2 over the entire length of the oligonucleotide.

[0213] Embodiment 12: Certain embodiments provide the compound of any one of the preceding embodiments, wherein the modified oligonucleotide comprises at least one modification selected from at least one modified internucleoside linkage, at least one modified nucleoside comprising a modified sugar moiety, and at least one modified nucleoside comprising a modified nucleobase.

[0214] Embodiment 13: Certain embodiments provide the compound of embodiment 12, wherein the modified internucleoside linkage is a phosphorothioate internucleoside linkage.

[0215] Embodiment 14: Certain embodiments provide the compound of embodiments 12 or 13, wherein at least one nucleoside of the modified oligonucleotide is a 2′-substituted nucleoside or a bicyclic nucleoside.

[0216] Embodiment 15: Certain embodiments provide the compound of embodiment 14, wherein the bicyclic sugar moiety of the bicyclic nucleoside is selected from the group consisting of: 4′-(CH₂)—O-2′ (LNA); 4′-(CH₂)₂—O-2′ (ENA); and 4′-CH(CH₃)—O-2′ (cEt).

[0217] Embodiment 16: Certain embodiments provide the compound of any one of embodiments 12-15, wherein the modified nucleoside is 2′-O-methoxyethyl nucleoside.

[0218] Embodiment 17: Certain embodiments provide the compound of any one of embodiments 12-16, wherein the modified nucleobase is a 5-methylcytosine.

[0219] Embodiment 18: Certain embodiments provide the compound of any one of embodiments 1-17, wherein the modified oligonucleotide has:
[0220] a gap segment consisting of linked 2′-deoxynucleosides;
[0221] a 5′ wing segment consisting of linked nucleosides; and
[0222] a 3′ wing segment consisting of linked nucleosides;

[0223] wherein the gap segment is positioned immediately adjacent to and between the 5′ wing segment and the 3′ wing segment and wherein each nucleoside of each wing segment comprises a modified sugar.

[0224] Embodiment 19: Certain embodiments provide the compound of any one of claims 1-18, wherein the modified sugar moiety of each nucleoside of each wing segment is selected from 2′-O-Me, 2′-MOE, and cEt sugar moieties.

[0225] Embodiment 20: Certain embodiments provide the compound of any of one claims 1-19, wherein the modified oligonucleotide comprises:
[0226] a gap segment consisting of ten linked deoxynucleosides;
[0227] a 5′ wing segment consisting of three linked nucleosides; and
[0228] a 3′ wing segment consisting of three linked nucleosides;

[0229] wherein the gap segment is positioned between the 5′ wing segment and the 3′ wing segment, wherein each nucleoside of each wing segment comprises a cEt nucleoside; wherein each internucleoside linkage is a phosphorothioate linkage and wherein each cytosine is a 5-methylcytosine.

[0230] Embodiment 21: Certain embodiments provide the compound of any of one claims 1-20, wherein the modified oligonucleotide comprises:
[0231] a gap segment consisting of ten linked deoxynucleosides;
[0232] a 5′ wing segment consisting of three linked nucleosides; and
[0233] a 3′ wing segment consisting of three linked nucleosides;

[0234] wherein the gap segment is positioned between the 5′ wing segment and the 3′ wing segment, wherein each nucleoside of each wing segment comprises a cEt nucleoside; wherein at least one internucleoside linkage is a phosphorothioate linkage and wherein each cytosine is a 5-methylcytosine.

[0235] Embodiment 22: Certain embodiments provide the compound of any of the preceding embodiments, wherein the modified oligonucleotide comprises:
[0236] a gap segment consisting of nine linked 2′-deoxynucleosides;
[0237] a 5′ wing segment consisting of three linked nucleosides; and
[0238] a 3′ wing segment consisting of four linked nucleosides;

[0239] wherein the gap segment is positioned between the 5′ wing segment and the 3′ wing segment, wherein each nucleoside of the 5′ wing segment comprises a cEt nucleoside; wherein the sugar moieties of the nucleosides of the 3′ wing segment are 5′-cEt-cEt-cEt-MOE-3′; wherein each internucleoside linkage is a phosphorothioate linkage and wherein each cytosine is a 5-methylcytosine.

[0240] Embodiment 23: Certain embodiments provide the compound of any of the preceding embodiments, wherein the modified oligonucleotide comprises:
[0241] a gap segment consisting of nine linked 2′-deoxynucleosides;
[0242] a 5′ wing segment consisting of three linked nucleosides; and
[0243] a 3′ wing segment consisting of four linked nucleosides;

[0244] wherein the gap segment is positioned between the 5′ wing segment and the 3′ wing segment, wherein each nucleoside of the 5′ wing segment comprises a cEt nucleoside; wherein each sugar moiety of the nucleosides of the 3′ wing segment are selected from cEt and 2′-MOE sugar moieties; wherein each internucleoside linkage is a phosphorothioate linkage and wherein each cytosine is a 5-methylcytosine.

[0245] Embodiment 24: Certain embodiments provide the compound of any one of the preceding embodiments, wherein the modified oligonucleotide comprises:
[0246] a gap segment consisting of ten linked nucleosides;
[0247] a 5′ wing segment consisting of three linked nucleosides; and
[0248] a 3′ wing segment consisting of four linked nucleosides;

[0249] wherein the gap segment is positioned between the 5′ wing segment and the 3′ wing segment and wherein the gap segment consists of 5′-one deoxy, one 2′-O-methyl nucleoside, and eight deoxynucleosides-3′, wherein each nucleoside of each of the wing segments comprises a cEt nucleoside; wherein each internucleoside linkage is a phosphorothioate linkage and wherein each cytosine is a 5-methylcytosine.

[0250] Embodiment 25: Embodiment 24: Certain embodiments provide the compound of any one of the preceding embodiments, wherein the modified oligonucleotide comprises:
[0251] a gap segment consisting of ten linked nucleosides;
[0252] a 5′ wing segment consisting of three linked nucleosides; and
[0253] a 3′ wing segment consisting of four linked nucleosides;

[0254] wherein the gap segment is positioned between the 5′ wing segment and the 3′ wing segment and wherein the nucleosides of the gap segment are selected from deoxynucleosides, cEt nucleosides and 2′-MOE nucleosides, wherein each nucleoside of each of the wing segments comprises a cEt nucleoside; wherein each internucleoside linkage is a phosphorothioate linkage and wherein each cytosine is a 5-methylcytosine.

[0255] Embodiment 26: Certain embodiments provide the compound of any one of embodiments 1-25, wherein the compound is single-stranded.

[0256] Embodiment 27: Certain embodiments provide the compound of any one of embodiments 1-25, wherein the modified oligonucleotide is hybridized to a second oligonucleotide to form a double-stranded antisense compound.

[0257] Embodiment 28: Certain embodiments provide the compound of any one of embodiments 1-27, wherein at least one of the nucleotides of the modified oligonucleotide is a ribonucleotide.

[0258] Embodiment 29: Certain embodiments provide the compound of any one of embodiments 1-27, wherein at least one of the nucleotides of the modified oligonucleotide is a deoxyribonucleotide.

[0259] Embodiment 30: Certain embodiments provide the compound of any one of embodiments 1-23, wherein the modified oligonucleotide consists of 10 to 30 linked nucleosides.

[0260] Embodiment 31: Certain embodiments provide the compound of any one of embodiments 1-30, wherein the modified oligonucleotide consists of 10 to 30 linked nucleosides.

[0261] Embodiment 32: Certain embodiments provide the compound of any one of embodiments 1-30, wherein the modified oligonucleotide consists of 16 to 30 linked nucleosides.

[0262] Embodiment 33: Certain embodiments provide a compound comprising a modified oligonucleotide consisting of 16 linked nucleosides, wherein the modified oligonucleotide has a nucleobase sequence selected from any one of SEQ ID NOs: 286, 817, 983, 1215, 747, 43, 355, 1602, 201, 734, 1249, 208, 513, 1449, 1448, 1595, and 819, wherein the modified oligonucleotide comprises:
[0263] a gap segment consisting of linked deoxynucleosides;
[0264] a 5′ wing segment consisting of linked nucleosides; and
[0265] a 3′ wing segment consisting of linked nucleosides;

[0266] wherein the gap segment is positioned between the 5′ wing segment and the 3′ wing segment and wherein each nucleoside of each wing segment comprises a modified sugar.

[0267] Embodiment 34: Certain embodiments provide a compound comprising a modified oligonucleotide consisting of 16 linked nucleosides, wherein the modified oligonucleotide has a nucleobase sequence selected from any one of SEQ ID NOs: 286, 817, 983, 1215, 747, 43, 355, 1602, 201, 734, 1249, 208, 513, 1449, 1448, and 1595, wherein the modified oligonucleotide comprises
[0268] a gap segment consisting of ten linked deoxynucleosides;
[0269] a 5′ wing segment consisting of three linked nucleosides; and
[0270] a 3′ wing segment consisting of three linked nucleosides;

[0271] wherein the gap segment is positioned between the 5′ wing segment and the 3′ wing segment; wherein the 5′ wing segment and the 3′ wing segment comprise cEt sugars; wherein each internucleoside linkage is a phosphorothioate linkage; and wherein each cytosine is a 5-methylcytosine.

[0272] Embodiment 35: Certain embodiments provide a compound comprising a modified oligonucleotide consisting of 16 linked nucleosides, wherein the modified oligonucleotide has a nucleobase sequence consisting of SEQ ID NO: 819, wherein the modified oligonucleotide comprises:
[0273] a gap segment consisting of nine linked 2′-deoxynucleosides;
[0274] a 5′ wing segment consisting of three linked nucleosides; and
[0275] a 3′ wing segment consisting of four linked nucleosides;

[0276] wherein the gap segment is positioned between the 5′ wing segment and the 3′ wing segment, wherein each nucleoside of the 5′ wing segment comprises a cEt sugar; wherein the sugar residues of the nucleosides of the 3′ wing segment are 5′-cEt-cEt-cEt-MOE-3′; wherein each internucleoside linkage is a phosphorothioate linkage and wherein each cytosine is a 5-methylcytosine.

[0277] Embodiment 36: Certain embodiments provide a a modified oligonucleotide consisting of 16 linked nucleosides, wherein the modified oligonucleotide has a nucleobase sequence consisting of SEQ ID NO: 1595, wherein the modified oligonucleotide comprises:

[0278] a gap segment consisting of ten linked nucleosides;

[0279] a 5′ wing segment consisting of three linked nucleosides; and

[0280] a 3′ wing segment consisting of four linked nucleosides;

[0281] wherein the gap segment is positioned between the 5′ wing segment and the 3′ wing segment and wherein the gap segment consists of 5′-one deoxy, one 2′-O-methyl nucleoside, and eight deoxynucleosides-3′, wherein each nucleoside of each of the wing segments comprises a cEt sugar; wherein each internucleoside linkage is a phosphorothioate linkage and wherein each cytosine is a 5-methylcytosine.

[0282] Embodiment 37: Certain embodiments provide the compound of any preceding embodiment, comprising a conjugate group.

[0283] Embodiment 38: Certain embodiments provide the compound of embodiment 37, wherein the conjugate group comprises a GalNAc cluster comprising 1-3 GalNAc ligands.

[0284] Embodiment 39: Certain embodiments provide the compound of embodiment 37 or embodiment 38, wherein the conjugate group comprises a conjugate linker consisting of a single bond.

[0285] Embodiment 40: Certain embodiments provide the compound of any one of embodiments 37-39, wherein the conjugate group comprises a cleavable linker.

[0286] Embodiment 41: Certain embodiments provide the compound of any one of embodiments 37-40, wherein the conjugate group comprises a conjugate linker comprising 1-3 linker-nucleosides.

[0287] Embodiment 42: Certain embodiments provide the compound of any one of embodiments 37-41, wherein the conjugate group is attached to the modified oligonucleotide at the 5′-end of the modified oligonucleotide.

[0288] Embodiment 42: Certain embodiments provide the compound of any one of embodiments 37-41, wherein the conjugate group is attached to the modified oligonucleotide at the 3′-end of the modified oligonucleotide.

[0289] Embodiment 43: Certain embodiments provide the compound having the following chemical structure or salt thereof:

[chemical structure]

[0290] Embodiment 44: Certain embodiments provide the compound having the following chemical structure or salt thereof:

[chemical structure]

[0291] Embodiment 45: Certain embodiments provide the compound having the following chemical structure or salt thereof:

[chemical structure]

[0292] Embodiment 46: Certain embodiments provide the compound having the following chemical structure or salt thereof:

[chemical structure]

[0293] Embodiment 47: Certain embodiments provide the compound having the following chemical structure or salt thereof:

[chemical structure]

[0294] Embodiment 48: Certain embodiments provide the compound having the following chemical structure or salt thereof:

[chemical structure]

[0295] Embodiment 49: Certain embodiments provide the compound having the following chemical structure or salt thereof:

[chemical structure]

[0296] Embodiment 50: Certain embodiments provide the compound having the following chemical structure or salt thereof:

[chemical structure]

[0297] Embodiment 51: Certain embodiments provide the compound having the following chemical structure or salt thereof:

[chemical structure]

[0298] Embodiment 52: Certain embodiments provide the compound having the following chemical structure or salt thereof:

[chemical structure]

[0299] Embodiment 53: Certain embodiments provide the compound having the following chemical structure or salt thereof:

[chemical structure]

[0300] Embodiment 54: Certain embodiments provide the compound having the following chemical structure or salt thereof:

[chemical structure]

[0301] Embodiment 55: Certain embodiments provide the compound having the following chemical structure or salt thereof:

[chemical structure]

[0302] Embodiment 56: Certain embodiments provide the compound having the following chemical structure or salt thereof:

[chemical structure]

[0303] Embodiment 57: Certain embodiments provide the compound having the following chemical structure or salt thereof:

[chemical structure]

[0304] Embodiment 58: Certain embodiments provide the compound having the following chemical structure or salt thereof:

[chemical structure]

[0305] Embodiment 59: Certain embodiments provide the compound having the following chemical structure or salt thereof:

[chemical structure]

[0306] Embodiment 60: Certain embodiments provide the compound having the following chemical structure or salt thereof:

[chemical structure]

[0307] Embodiment 61: Certain embodiments provide the compound of any one of the embodiments 43-60, wherein the compound is a sodium salt.

[0308] Embodiment 62: Certain embodiments provide the compound of any one of the embodiments 43-60, wherein the compound is a potassium salt.

[0309] Embodiment 63: Certain embodiments provide the chirally enriched population of the compound of any one of embodiments 1-62, wherein the population is enriched for compounds having a modified oligonucleotide comprising at least one particular phosphorothioate internucleoside linkage having a particular stereochemical configuration.

[0310] Embodiment 64: Certain embodiments provide the chirally enriched population of embodiment 63, wherein the population is enriched for compounds having a modified oligonucleotide comprising at least one particular phosphorothioate internucleoside linkage having the (Sp) configuration.

[0311] Embodiment 65: Certain embodiments provide the chirally enriched population of embodiment 63 or embodiment 64, wherein the population is enriched for compounds having a modified oligonucleotide comprising at least one particular phosphorothioate internucleoside linkage having the (Rp) configuration.

[0312] Embodiment 66: Certain embodiments provide the chirally enriched population of claim 63, wherein the population is enriched for compounds having a modified oligonucleotide having a particular, independently selected stereochemical configuration at each phosphorothioate internucleoside linkage.

[0313] Embodiment 67: Certain embodiments provide the chirally enriched population of embodiment 66, wherein the population is enriched for oligomeric compounds having a modified oligonucleotide having the (Sp) configuration at each phosphorothioate internucleoside linkage.

[0314] Embodiment 68: Certain embodiments provide the chirally enriched population of embodiment 66, wherein the population is enriched for oligomeric compounds having a modified oligonucleotide having the (Rp) configuration at each phosphorothioate internucleoside linkage.

[0315] Embodiment 69: Certain embodiments provide the chirally enriched population of embodiment 63 or 66, wherein wherein the population is enriched for oligomeric compounds having a modified oligonucleotide having at least 3 contiguous phosphorothioate internucleoside linkages in the Sp-Sp-Rp configurations, in the 5′ to 3′ direction.

[0316] Embodiment 70: Certain embodiments provide a population of compounds having a modified oligonucleotide of any of embodiments 69, wherein all of the phosphorothioate internucleoside linkages of the modified oligonucleotide are stereorandom.

[0317] Embodiment 71: Certain embodiments provide a composition comprising the compound of any one of embodiments 1-70 and a pharmaceutically acceptable carrier.

[0318] Embodiment 72: Certain embodiments provide a composition comprising a compound of any preceding embodiment, for use in therapy.

[0319] Embodiment 73: Certain embodiments provide a method of treating, preventing, or ameliorating a disease associated with HSD17B13 in an individual comprising administering to the individual a compound complementary to HSD17B13, thereby treating, preventing, or ameliorating the disease.

[0320] Embodiment 74: Certain embodiments provide a method of administering the compound of embodiments 1-70 or composition of embodiment 71 or embodiment 72 to an individual.

[0321] Embodiment 75: Certain embodiments provide the method of embodiments 73 or 74, wherein the individual has a liver disease, NAFLD, NASH, hepatic steatosis, hepatocellular carcinoma, alcoholic liver disease, HCV hepatitis, chronic hepatitis, hereditary hemochromatosis, or primary sclerosing cholangitis.

[0322] Embodiment 76: Certain embodiments provide the method of embodiment 73 or embodiment 74, wherein the compound is an antisense compound.

[0323] Embodiment 77: Certain embodiments provide the method of any of embodiments 73-76, wherein administering the compound ameliorates liver damage, steatosis, liver fibrosis, liver inflammation, liver scarring or cirrhosis, liver failure, liver enlargement, elevated transaminases, or hepatic fat accumulation in the individual.

[0324] Embodiment 78: Certain embodiments provide a method of inhibiting expression of HSD17B13 in a cell comprising contacting the cell with a compound comprising a modified oligonucleotide complementary to HSD17B13, thereby inhibiting expression of HSD17B13 in the cell.

[0325] Embodiment 79: Certain embodiments provide the method of embodiment 78, wherein the cell is in the liver of an individual.

[0326] Embodiment 80: Certain embodiments provide the method of embodiment 79, wherein the individual has, or is at risk of having, liver disease, NAFLD, NASH, hepatic steatosis, hepatocellular carcinoma, alcoholic liver disease, HCV hepatitis, chronic hepatitis, hereditary hemochromatosis, or primary sclerosing cholangitis.

[0327] Embodiment 81: Certain embodiments provide a method of ameliorating, reducing or inhibiting liver damage, steatosis, liver fibrosis, liver inflammation, liver scarring or cirrhosis, liver failure, liver enlargement, elevated transaminases, or hepatic fat accumulation in an individual, comprising administering a compound comprising a modified oligonucleotide complementary to HSD17B13 to the individual, thereby reducing or inhibiting liver damage, steatosis, liver fibrosis, liver inflammation, liver scarring or cirrhosis, liver failure, liver enlargement, elevated transaminases, or hepatic fat accumulation in the individual.

[0328] Embodiment 82: Certain embodiments provide the method of embodiment 81, wherein the individual has, or is at risk of having, liver disease, NAFLD, NASH, hepatic steatosis, hepatocellular carcinoma, alcoholic liver disease, HCV hepatitis, chronic hepatitis, hereditary hemochromatosis, or primary sclerosing cholangitis.

[0329] Embodiment 83: Certain embodiments provide the method of any one of embodiments 78-82, wherein the compound is an antisense compound.

[0330] Embodiment 84: Certain embodiments provide the method of any one of embodiments 78-83, wherein the compound is the compound of any one of embodiments 1-70 or composition of embodiment 71 or embodiment 72.

[0331] Embodiment 85: Certain embodiments provide the method of embodiment 83 or embodiment 84, wherein the compound or composition is administered parenterally.

[0332] Embodiment 86: Certain embodiments provide the use of a compound comprising a modified oligonucleotide complementary to HSD17B13 for treating, preventing, or ameliorating a disease associated with HSD17B13.

[0333] Embodiment 87: Certain embodiments provide the use of embodiment 86, wherein the disease is liver disease, NAFLD, NASH, hepatic steatosis, hepatocellular carcinoma, alcoholic liver disease, HCV hepatitis, chronic hepatitis, hereditary hemochromatosis, or primary sclerosing cholangitis.

[0334] Embodiment 88: Certain embodiments provide the use of embodiments 86 or 87, wherein the compound is an antisense compound.

[0335] Embodiment 89: Certain embodiments provide the use of any one of embodiments 86-88, wherein the compound is the compound of any one of embodiments 1-70 or composition of embodiment 71 or embodiment 72.

[0336] Embodiment 90: Certain embodiments provide the use of a compound comprising a modified oligonucleotide complementary to HSD17B13 in the manufacture of a medicament for treating, preventing, or ameliorating a disease associated with HSD17B13.

[0337] Embodiment 91: Certain embodiments provide the use of embodiment 90, wherein the disease is liver disease, NAFLD, NASH, hepatic steatosis, hepatocellular carcinoma, alcoholic liver disease, HCV hepatitis, chronic hepatitis, hereditary hemochromatosis, or primary sclerosing cholangitis.

[0338] Embodiment 92: Certain embodiments provide the use of embodiments 90 or 91, wherein the compound is an antisense compound.

[0339] Embodiment 93: Certain embodiments provide the use of any one of embodiments 90-92, wherein the compound is the compound of any one of embodiments 1-70 or composition of embodiment 71 or embodiment 72.

### Certain Indications

[0340] Certain embodiments provided herein relate to methods of inhibiting HSD17B13 expression, which can be useful for treating, preventing, or ameliorating a disease associated with HSD17B13 in an individual, by administration of a compound that targets HSD17B13. In certain embodiments, the compound can be a HSD17B13 specific inhibitor. In certain embodiments, the compound can be an antisense compound, an oligomeric compound, or an oligonucleotide targeted to HSD17B13.

[0341] Examples of diseases associated with HSD17B13 treatable, preventable, and/or ameliorable with the methods provided herein include liver disease, NAFLD, NASH, alcoholic steatohepatitis (ASH), alcoholic liver disease, nonalcoholic liver disease, alcoholic cirrhosis, nonalcoholic cirrhosis, steatohepatisis, hepatic steatosis, hepatocellular carcinoma, alcoholic liver disease, HCV hepatitis, chronic hepatitis, hereditary hemochromatosis, or primary sclerosing cholangitis. Certain compounds provided herein are directed to compounds and compositions that reduce liver damage, steatosis, liver fibrosis, liver inflammation, liver scarring or cirrhosis, liver failure, liver enlargement, elevated transaminases, or hepatic fat accumulation in an animal.

[0342] In certain embodiments, a method of treating, preventing, or ameliorating a disease associated with HSD17B13 in an individual comprises administering to the individual a compound comprising a HSD17B13 specific inhibitor, thereby treating, preventing, or ameliorating the disease. In certain embodiments, the individual is identified as having, or at risk of having, a disease associated with HSD17B13. In certain embodiments, the disease is a liver disease. In certain embodiments, the compound comprises an antisense compound targeted to HSD17B13. In certain embodiments, the compound comprises an oligonucleotide targeted to HSD17B13. In certain embodiments, a compound comprises a modified oligonucleotide consisting of 8 to 80 linked nucleosides and having a nucleobase sequence comprising at least 8 contiguous nucleobases of any of the nucleobase sequences of SEQ ID NOs: 8-2896. In certain embodiments, a compound comprises a modified oligonucleotide consisting of 16 to 80 linked nucleosides and having a nucleobase sequence comprising the nucleobase sequence of any one of SEQ ID NOs: 8-2896. In certain embodiments, a compound comprises a modified oligonucleotide consisting of the nucleobase sequence of any one of SEQ ID NOs: 8-2896. In any of the foregoing embodiments, the compound can be single-stranded or double-stranded. In any of the foregoing embodiments, the compound can be an antisense compound or oligomeric compound. In certain embodiments, the compound is administered to the individual parenterally. In certain embodiments, administering the compound improves, preserves, or prevents liver damage, steatosis, liver fibrosis, cirrhosis, elevated transaminases, or hepatic fat accumulation in an animal.

[0343] In certain embodiments, a method of treating, preventing, or ameliorating liver damage, steatosis, liver fibrosis, cirrhosis, elevated transaminases, or hepatic fat accumulation in an animal comprises administering to the individual a compound comprising a HSD17B13 specific inhibitor, thereby treating, preventing, or ameliorating liver damage, steatosis, liver fibrosis, cirrhosis, elevated transaminases, or hepatic fat accumulation. In certain embodiments, the compound comprises an antisense compound targeted to HSD17B13. In certain embodiments, the compound comprises an oligonucleotide targeted to HSD17B13. In certain embodiments, a compound comprises consisting of 8 to 80 linked nucleosides and having a nucleobase sequence comprising at least 8 contiguous nucleobases of any of the nucleobase sequences of SEQ ID NOs: 8-2896. In certain embodiments, a compound comprises a modified oligonucleotide consisting of 16 to 80 linked nucleosides and having a nucleobase sequence comprising the nucleobase sequence of any one of SEQ ID NOs: 8-2896. In certain embodiments, a compound comprises a modified oligonucleotide consisting of the nucleobase sequence of any one of SEQ ID NOs: 8-2896. In any of the foregoing embodiments, the compound can be single-stranded or double-stranded. In any of the foregoing embodiments, the compound can be an antisense compound or oligomeric compound. In certain embodiments, the compound is administered to the individual parenterally. In certain embodiments, administering the compound improves, preserves, or prevents liver damage, steatosis, liver fibrosis, cirrhosis, elevated transaminases, or hepatic fat accumulation. In certain embodiments, the individual is identified as having, or at risk of having, a disease associated with HSD17B13.

[0344] In certain embodiments, a method of inhibiting expression of HSD17B13 in an individual having, or at risk of having, a disease associated with HSD17B13 comprises administering to the individual a compound comprising a HSD17B13 specific inhibitor, thereby inhibiting expression of HSD17B13 in the individual. In certain embodiments, administering the compound inhibits expression of HSD17B13 in the liver. In certain embodiments, the disease is a liver disease. In certain embodiments, the individual has, or is at risk of having, liver disease, NAFLD, NASH, alcoholic steatohepatitis (ASH), alcoholic liver disease, nonalcoholic liver disease, alcoholic cirrhosis, nonalcoholic cirrhosis, steatohepatisis, hepatic steatosis, hepatocellular carcinoma, alcoholic liver disease, HCV hepatitis, chronic hepatitis, hereditary hemochromatosis, or primary sclerosing cholangitis. In certain embodiments, the individual has, or is at risk of having, liver damage, steatosis, liver fibrosis, cirrhosis, elevated transaminases, or hepatic fat accumulation. In certain embodiments, the compound comprises an antisense compound targeted to HSD17B13. In certain embodiments, the compound comprises an oligonucleotide targeted to HSD17B13. In certain embodiments, a compound comprises consisting of 8 to 80 linked nucleosides and having a nucleobase sequence comprising at least 8 contiguous nucleobases of any of the nucleobase sequences of SEQ ID NOs: 8-2896. In certain embodiments, a compound comprises a modified oligonucleotide consisting of 16 to 80 linked nucleosides and having a nucleobase sequence comprising the nucleobase sequence of any one of SEQ ID NOs: 8-2896. In certain embodiments, a compound comprises a modified oligonucleotide consisting of the nucleobase sequence of any one of SEQ ID NOs: 8-2896. In any of the foregoing embodiments, the compound can be single-stranded or double-stranded. In any of the foregoing embodiments, the compound can be an antisense compound or oligomeric compound. In certain embodiments, the compound is administered to the individual parenterally. In certain embodiments, administering the compound improves, preserves, or prevents liver damage, steatosis, liver fibrosis, cirrhosis, elevated transaminases, or hepatic fat accumulation.

[0345] In certain embodiments, a method of inhibiting expression of HSD17B13 in a cell comprises contacting the cell with a compound comprising a HSD17B13 specific inhibitor, thereby inhibiting expression of HSD17B13 in the cell. In certain embodiments, the cell is a hepatocyte. In certain embodiments, the cell is in the liver. In certain embodiments, the cell is in the liver of an individual who has, or is at risk of having, liver damage, steatosis, liver fibrosis, cirrhosis, elevated transaminases, or hepatic fat accumulation. In certain embodiments, the compound comprises an antisense compound targeted to HSD17B13. In certain embodiments, the compound comprises an oligonucleotide targeted to HSD17B13. In certain embodiments, a compound comprises consisting of 8 to 80 linked nucleosides and having a nucleobase sequence comprising at least 8 contiguous nucleobases of any of the nucleobase sequences of SEQ ID NOs: 8-2896. In certain embodiments, a compound comprises a modified oligonucleotide consisting of 16 to 80 linked nucleosides and having a nucleobase sequence comprising the nucleobase sequence of any one of SEQ ID NOs: 8-2896. In certain embodiments, a compound comprises a modified oligonucleotide consisting of the nucleobase sequence of any one of SEQ ID NOs: 8-2896. In any of the foregoing embodiments, the compound can be single-stranded or double-stranded. In any of the foregoing embodiments, the compound can be an antisense compound or oligomeric compound.

[0346] In certain embodiments, a method of reducing or inhibiting liver damage, steatosis, liver fibrosis, cirrhosis, elevated transaminases, or hepatic fat accumulation in an individual having, or at risk of having, a disease associated with HSD17B13 comprises administering to the individual a compound comprising a HSD17B13 specific inhibitor, thereby reducing or inhibiting liver damage, steatosis, liver fibrosis, cirrhosis, elevated transaminases, or hepatic fat accumulation in the individual. In certain embodiments, the individual has, or is at risk of having, liver disease, NAFLD, NASH, alcoholic steatohepatitis (ASH), alcoholic liver disease, nonalcoholic liver disease, alcoholic cirrhosis, nonalcoholic cirrhosis, steatohepatisis, hepatic steatosis, hepatocellular carcinoma, alcoholic liver disease, HCV hepatitis, chronic hepatitis, hereditary hemochromatosis, or primary sclerosing cholangitis. In certain embodiments, the compound comprises an antisense compound targeted to HSD17B13. In certain embodiments, the compound comprises an oligonucleotide targeted to HSD17B13. In certain embodiments, a compound comprises consisting of 8 to 80 linked nucleosides and having a nucleobase sequence comprising at least 8 contiguous nucleobases of any of the nucleobase sequences of SEQ ID NOs: 8-2896. In certain embodiments, a compound comprises a modified oligonucleotide consisting of 16 to 80 linked nucleosides and having a nucleobase sequence comprising the nucleobase sequence of any one of SEQ ID NOs: 8-2896. In certain embodiments, a compound comprises a modified oligonucleotide consisting of the nucleobase sequence of any one of SEQ ID NOs: 8-2896. In any of the foregoing embodiments, the compound can be single-stranded or double-stranded. In any of the foregoing embodiments, the compound can be an antisense compound or oligomeric compound. In certain embodiments, the compound is administered to the individual parenterally. In certain embodiments, the individual is identified as having, or at risk of having, a disease associated with HSD17B13.

[0347] Certain embodiments are drawn to a compound comprising a HSD17B13 specific inhibitor for use in treating a disease associated with HSD17B13. In certain embodiments, the disease is liver disease, NAFLD, NASH, alcoholic steatohepatitis (ASH), alcoholic liver disease, nonalcoholic liver disease, alcoholic cirrhosis, nonalcoholic cirrhosis, steatohepatisis, hepatic steatosis, hepatocellular carcinoma, alcoholic liver disease, HCV hepatitis, chronic hepatitis, hereditary hemochromatosis, or primary sclerosing cholangitis. In certain embodiments, the compound comprises an antisense compound targeted to HSD17B13. In certain embodiments, the compound comprises an oligonucleotide targeted to HSD17B13. In certain embodiments, a compound comprises consisting of 8 to 80 linked nucleosides and having a nucleobase sequence comprising at least 8 contiguous nucleobases of any of the nucleobase sequences of SEQ ID NOs: 8-2896. In certain embodiments, a compound comprises a modified oligonucleotide consisting of 16 to 80 linked nucleosides and having a nucleobase sequence comprising the nucleobase sequence of any one of SEQ ID NOs: 8-2896. In certain embodiments, a compound comprises a modified oligonucleotide consisting of the nucleobase sequence of any one of SEQ ID NOs: 8-2896. In any of the foregoing embodiments, the compound can be single-stranded or double-stranded. In any of the foregoing embodiments, the compound can be an antisense compound or oligomeric compound. In certain embodiments, the compound is administered to the individual parenterally.

[0348] Certain embodiments are drawn to a compound comprising a HSD17B13 specific inhibitor for use in reducing or inhibiting liver damage, steatosis, liver fibrosis, cirrhosis, elevated transaminases, or hepatic fat accumulation in an individual having, or at risk of having, liver disease, NAFLD, NASH, alcoholic steatohepatitis (ASH), alcoholic liver disease, nonalcoholic liver disease, alcoholic cirrhosis, nonalcoholic cirrhosis, steatohepatisis, hepatic steatosis, hepatocellular carcinoma, alcoholic liver disease, HCV hepatitis, chronic hepatitis, hereditary hemochromatosis, or primary sclerosing cholangitis. In certain embodiments, the compound comprises an antisense compound targeted to HSD17B13. In certain embodiments, the compound comprises an oligonucleotide targeted to HSD17B13. In certain embodiments, a compound comprises consisting of 8 to 80 linked nucleosides and having a nucleobase sequence comprising at least 8 contiguous nucleobases of any of the nucleobase sequences of SEQ ID NOs: 8-2896. In certain embodiments, a compound comprises a modified oligonucleotide consisting of 16 to 80 linked nucleosides and having a nucleobase sequence comprising the nucleobase sequence of any one of SEQ ID NOs: 8-2896. In certain embodiments, a compound comprises a modified oligonucleotide consisting of the nucleobase sequence of any one of SEQ ID NOs: 8-2896. In any of the foregoing embodiments, the compound can be single-stranded or double-stranded. In any of the foregoing embodiments, the compound can be an antisense compound or oligomeric compound.

[0349] Certain embodiments are drawn to the use of a compound comprising a HSD17B13 specific inhibitor for the manufacture or preparation of a medicament for treating a disease associated with HSD17B13. Certain embodiments are drawn to the use of a compound comprising a HSD17B13 specific inhibitor for the preparation of a medicament for treating a disease associated with HSD17B13. In certain embodiments, the disease is a liver disease. In certain embodiments, the disease is liver disease, NAFLD, NASH, alcoholic steatohepatitis (ASH), alcoholic liver disease, nonalcoholic liver disease, alcoholic cirrhosis, nonalcoholic cirrhosis, steatohepatisis, hepatic steatosis, hepatocellular carcinoma, alcoholic liver disease, HCV hepatitis, chronic hepatitis, hereditary hemochromatosis, or primary sclerosing cholangitis. In certain embodiments, the compound comprises an antisense compound targeted to HSD17B13. In certain embodiments, the compound comprises an oligonucleotide targeted to HSD17B13. In certain embodiments, a compound comprises consisting of 8 to 80 linked nucleosides and having a nucleobase sequence comprising at least 8 contiguous nucleobases of any of the nucleobase sequences of SEQ ID NOs: 8-2896. In certain embodiments, a compound comprises a modified oligonucleotide consisting of 16 to 80 linked nucleosides and having a nucleobase sequence comprising the nucleobase sequence of any one of SEQ ID NOs: 8-2896. In certain embodiments, a compound comprises a modified oligonucleotide consisting of the nucleobase sequence of any one of SEQ ID NOs: 8-2896. In any of the foregoing embodiments, the compound can be single-stranded or double-stranded. In any of the foregoing embodiments, the compound can be an antisense compound or oligomeric compound.

[0350] Certain embodiments are drawn to the use of a compound comprising a HSD17B13 specific inhibitor for the manufacture or preparation of a medicament for reducing or inhibiting liver damage, steatosis, liver fibrosis, cirrhosis, elevated transaminases, or hepatic fat accumulation in an individual having, or at risk of having, a disease associated with HSD17B13. In certain embodiments, the disease is liver disease, NAFLD, NASH, alcoholic steatohepatitis (ASH), alcoholic liver disease, nonalcoholic liver disease, alcoholic cirrhosis, nonalcoholic cirrhosis, steatohepatisis, hepatic steatosis, hepatocellular carcinoma, alcoholic liver disease, HCV hepatitis, chronic hepatitis, hereditary hemochromatosis, or primary sclerosing cholangitis. Certain embodiments are drawn to use of a compound comprising a HSD17B13 specific inhibitor for the preparation of a medicament for treating a disease associated with HSD17B13. In certain embodiments, the disease is liver disease, NAFLD, NASH, alcoholic liver disease, nonalcoholic liver disease, alcoholic cirrhosis, nonalcoholic cirrhosis, steatohepatisis, hepatic steatosis, hepatocellular carcinoma, alcoholic liver disease, HCV hepatitis, chronic hepatitis, hereditary hemochromatosis, or primary sclerosing cholangitis. In certain embodiments, the compound comprises an antisense compound targeted to HSD17B13. In certain embodiments, the compound comprises an oligonucleotide targeted to HSD17B13. In certain embodiments, a compound comprises consisting of 8 to 80 linked nucleosides and having a nucleobase sequence comprising at least 8 contiguous nucleobases of any of the nucleobase sequences of SEQ ID NOs: 8-2896. In certain embodiments, a compound comprises a modified oligonucleotide consisting of 16 to 80 linked nucleosides and having a nucleobase sequence comprising the nucleobase sequence of any one of SEQ ID NOs: 8-2896. In certain embodiments, a compound comprises a modified oligonucleotide consisting of the nucleobase sequence of any one of SEQ ID NOs: 8-2896. In any of the foregoing embodiments, the compound can be single-stranded or double-stranded. In any of the foregoing embodiments, the compound can be an antisense compound or oligomeric compound.

[0351] In any of the foregoing methods or uses, the compound can be targeted to HSD17B13. In certain embodiments, the compound comprises or consists of a modified oligonucleotide, for example, a modified oligonucleotide consisting of 8 to 80 linked nucleosides, 10 to 30 linked nucleosides, 12 to 30 linked nucleosides, or 20 linked nucleosides. In certain embodiments, the modified oligonucleotide is at least 80%, at least 85%, at least 90%, at least 95% or 100% complementary to any of the nucleobase sequences recited in SEQ ID NOs: 1-4. In certain embodiments, the modified oligonucleotide comprises at least one modified internucleoside linkage, at least one modified sugar and/or at least one modified nucleobase. In certain embodiments, the modified internucleoside linkage is a phosphorothioate internucleoside linkage, the modified sugar is a bicyclic sugar or a 2′-O-methoxyethyl modified sugar, and the modified nucleobase is a 5-methylcytosine. In certain embodiments, the modified oligonucleotide comprises a gap segment consisting of linked deoxynucleosides; a 5′ wing segment consisting of linked nucleosides; and a 3′ wing segment consisting of linked nucleosides, wherein the gap segment is positioned immediately adjacent to and between the 5′ wing segment and the 3′ wing segment and wherein each nucleoside of each wing segment comprises a modified sugar.

[0352] In any of the foregoing embodiments, the modified oligonucleotide consists of 12 to 30, 15 to 30, 15 to 25, 15 to 24, 16 to 24, 17 to 24, 18 to 24, 19 to 24, 20 to 24, 19 to 22, 20 to 22, 16 to 20, or 16 or 20 linked nucleosides. In certain embodiments, the modified oligonucleotide is at least 80%, at least 85%, at least 90%, at least 95% or 100% complementary to any of the nucleobase sequences recited in SEQ ID NOs: 1-4.

[0353] In any of the foregoing methods or uses, the compound comprises or consists of a modified oligonucleotide consisting of 16 to 30 linked nucleosides and having a nucleobase sequence comprising any one of SEQ ID NOs: 8-2896, wherein the modified oligonucleotide has:
[0354] a gap segment consisting of linked 2′-deoxynucleosides;
[0355] a 5′ wing segment consisting of linked nucleosides; and
[0356] a 3′ wing segment consisting of linked nucleosides;

[0357] wherein the gap segment is positioned between the 5′ wing segment and the 3′ wing segment and wherein each nucleoside of each wing segment comprises a modified sugar. In certain embodiments, the modified oligonucleotide is 16-30 linked nucleosides in length. In certain embodiments, the modified oligonucleotide is 16 linked nucleosides in length.

[0358] In any of the foregoing methods or uses, the compound can be administered parenterally. For example, in certain embodiments the compound can be administered through injection or infusion. Parenteral administration includes subcutaneous administration, intravenous administration, intramuscular administration, intraarterial administration, intraperitoneal administration, or intracranial administration, e.g. intrathecal or intracerebroventricular administration.

### Certain Compounds

[0359] In certain embodiments, compounds described herein can be antisense compounds. In certain embodiments, the antisense compound comprises or consists of an oligomeric compound. In certain embodiments, the oligomeric compound comprises a modified oligonucleotide. In certain embodiments, the modified oligonucleotide has a nucleobase sequence complementary to that of a target nucleic acid.

[0360] In certain embodiments, a compound described herein comprises or consists of a modified oligonucleotide. In certain embodiments, the modified oligonucleotide has a nucleobase sequence complementary to that of a target nucleic acid.

[0361] In certain embodiments, a compound or antisense compound is single-stranded. Such a single-stranded compound or antisense compound comprises or consists of an oligomeric compound. In certain embodiments, such an oligomeric compound comprises or consists of an oligonucleotide and optionally a conjugate group. In certain embodiments, the oligonucleotide is an antisense oligonucleotide. In certain embodiments, the oligonucleotide is modified. In certain embodiments, the oligonucleotide of a single-stranded antisense compound or oligomeric compound comprises a self-complementary nucleobase sequence.

[0362] In certain embodiments, compounds are double-stranded. Such double-stranded compounds comprise a first modified oligonucleotide having a region complementary to a target nucleic acid and a second modified oligonucleotide having a region complementary to the first modified oligonucleotide. In certain embodiments, the modified oligonucleotide is an RNA oligonucleotide. In such embodiments, the thymine nucleobase in the modified oligonucleotide is replaced by a uracil nucleobase. In certain embodiments, compound comprises a conjugate group. In certain embodiments, one of the modified oligonucleotides is conjugated. In certain embodiments, both the modified oligonucleotides are conjugated. In certain embodiments, the first modified oligonucleotide is conjugated. In certain embodiments, the second modified oligonucleotide is conjugated. In certain embodiments, the first modified oligonucleotide is 16-30 linked nucleosides in length and the second modified oligonucleotide is 16-30 linked nucleosides in length. In certain embodiments, one of the modified oligonucleotides has a nucleobase sequence comprising at least 8 contiguous nucleobases of any of SEQ ID NOs: 8-2035.

[0363] In certain embodiments, antisense compounds are double-stranded. Such double-stranded antisense compounds comprise a first oligomeric compound having a region complementary to a target nucleic acid and a second oligomeric compound having a region complementary to the first oligomeric compound. The first oligomeric compound of such double stranded antisense compounds typically comprises or consists of a modified oligonucleotide and optionally a conjugate group. The oligonucleotide of the second oligomeric compound of such a double-stranded antisense compound may be modified or unmodified. Either or both oligomeric compounds of a double-stranded antisense compound may comprise a conjugate group. The oligomeric compounds of double-stranded antisense compounds may include non-complementary overhanging nucleosides.

[0364] Examples of single-stranded and double-stranded compounds include, but are not limited to, oligonucleotides, siRNAs, microRNA targeting oligonucleotides, and single-stranded RNAi compounds, such as small hairpin RNAs (shRNAs), single-stranded siRNAs (ssRNAs), and microRNA mimics.

[0365] In certain embodiments, a compound described herein has a nucleobase sequence that, when written in the 5′ to 3′ direction, comprises the reverse complement of the target segment of a target nucleic acid to which it is targeted.

[0366] In certain embodiments, a compound described herein comprises an oligonucleotide 12 to 30 linked subunits in length. In certain embodiments, a compound described herein comprises an oligonucleotide 12 to 22 linked subunits in length. In certain embodiments, compound described herein comprises an oligonucleotide 14 to 30 linked subunits in length. In certain embodiments, compound described herein comprises an oligonucleotide 14 to 20 linked subunits in length. In certain embodiments, a compound described herein comprises an oligonucleotide 15 to 30 linked subunits in length. In certain embodiments, a compound described herein comprises an oligonucleotide 15 to 20 linked subunits in length. In certain embodiments, a compound described herein comprises an oligonucleotide 16 to 30 linked subunits in length. In certain embodiments, a compound described herein comprises an oligonucleotide 16 to 20 linked subunits in length. In certain embodiments, a compound described herein comprises an oligonucleotide 17 to 30 linked subunits in length. In certain embodiments, a compound described herein comprises an oligonucleotide 17 to 20 linked subunits in length. In certain embodiments, a compound described herein comprises an oligonucleotide 18 to 30 linked subunits in length. In certain embodiments, a compound described herein comprises an oligonucleotide 18 to 20 linked subunits in length. In certain embodiments, a compound described herein comprises an oligonucleotide 20 to 30 linked subunits in length. In other words, such oligonucleotides are 12 to 30 linked subunits, 14 to 30 linked subunits, 14 to 20 subunits, 15 to 30 subunits, 15 to 20 subunits, 16 to 30 subunits, 16 to 20 subunits, 17 to 30 subunits, 17 to 20 subunits, 18 to 30 subunits, 18 to 20 subunits, or 20 to 30 subunits in length, respectively. In certain embodiments, a compound described herein comprises an oligonucleotide 14 linked subunits in length. In certain embodiments, a compound described herein comprises an oligonucleotide 16 linked subunits in length. In certain embodiments, a compound described herein comprises an oligonucleotide 17 linked subunits in length. In certain embodiments, compound described herein comprises an oligonucleotide 18 linked subunits in length. In certain embodiments, a compound described herein comprises an oligonucleotide 19 linked subunits in length. In certain embodiments, a compound described herein comprises an oligonucleotide 20 linked subunits in length. In other embodiments, a compound described herein comprises an oligonucleotide 8 to 80, 12 to 50, 13 to 30, 13 to 50, 14 to 30, 14 to 50, 15 to 30, 15 to 50, 16 to 30, 16 to 50, 17 to 30, 17 to 50, 18 to 22, 18 to 24, 18 to 30, 18 to 50, 19 to 22, 19 to 30, 19 to 50, or 20 to 30 linked subunits. In certain such embodiments, the compound described herein comprises an oligonucleotide 8, 9, 10, 11, 12, 13, 14, 15, 16, 17, 18, 19, 20, 21, 22, 23, 24, 25, 26, 27, 28, 29, or 30 linked subunits in length, or a range defined by any two of the above values. In some embodiments the linked subunits are nucleotides, nucleosides, or nucleobases.

[0367] In certain embodiments, the compound may further comprise additional features or elements, such as a conjugate group, that are attached to the oligonucleotide. In certain embodiments, such compounds are antisense compounds. In certain embodiments, such compounds are oligomeric compounds. In embodiments where a conjugate group comprises a nucleoside (i.e. a nucleoside that links the conjugate group to the oligonucleotide), the nucleoside of the conjugate group is not counted in the length of the oligonucleotide.

[0368] In certain embodiments, compounds may be shortened or truncated. For example, a single subunit may be deleted from the 5′ end (5′ truncation), or alternatively from the 3′ end (3′ truncation). A shortened or truncated compound targeted to a HSD17B13 nucleic acid may have two subunits deleted from the 5′ end, or alternatively, may have two subunits deleted from the 3′ end of the compound. Alternatively, the deleted nucleosides may be dispersed throughout the compound.

[0369] When a single additional subunit is present in a lengthened compound, the additional subunit may be located at the 5′ or 3′ end of the compound. When two or more additional subunits are present, the added subunits may be adjacent to each other, for example, in a compound having two subunits added to the 5′ end (5′ addition), or alternatively, to the 3′ end (3′ addition) of the compound. Alternatively, the added subunits may be dispersed throughout the compound.

[0370] It is possible to increase or decrease the length of a compound, such as an oligonucleotide, and/or introduce mismatch bases without eliminating activity (Woolf et al. Proc. Natl. Acad. Sci. USA 1992, 89:7305-7309; Gautschi et al. J. Natl. Cancer Inst. March 2001, 93:463-471; Maher and Dolnick Nuc. Acid. Res. 1998, 16:3341-3358). However, seemingly small changes in oligonucleotide sequence, chemistry and motif can make large differences in one or more of the many properties required for clinical development (Seth et al. J. Med. Chem. 2009, 52, 10; Egli et al. J. Am. Chem. Soc. 2011, 133, 16642).

[0371] In certain embodiments, compounds described herein are interfering RNA compounds (RNAi), which include double-stranded RNA compounds (also referred to as short-interfering RNA or siRNA) and single-stranded RNAi compounds (or ssRNA). Such compounds work at least in part through the RISC pathway to degrade and/or sequester a target nucleic acid (thus, include microRNA/microRNA-mimic compounds). As used herein, the term siRNA is meant to be equivalent to other terms used to describe nucleic acid molecules that are capable of mediating sequence-specific RNAi, for example, short interfering RNA (siRNA), double-stranded RNA (dsRNA), micro-RNA (miRNA), short hairpin RNA (shRNA), short interfering oligonucleotide, short interfering nucleic acid, short interfering modified oligonucleotide, chemically modified siRNA, post-transcriptional gene silencing RNA (ptgsRNA), and others. In addition, as used herein, the term “RNAi” is meant to be equivalent to other terms used to describe sequence-specific RNA interference, such as post transcriptional gene silencing, translational inhibition, or epigenetics.

[0372] In certain embodiments, a compound described herein can comprise any of the oligonucleotide sequences targeted to HSD17B13 described herein. In certain embodiments, the compound can be double-stranded. In certain embodiments, the compound comprises a first strand comprising at least an 8, 9, 10, 11, 12, 13, 14, 15, or 16 contiguous nucleobase portion of any one of SEQ ID NOs: 8-2035 and a second strand. In certain embodiments, the compound comprises a first strand comprising the nucleobase sequence of any one of SEQ ID NOs: 8-2035 and a second strand. In certain embodiments, the compound comprises ribonucleotides in which the first strand has uracil (U) in place of thymine (T) in any one of SEQ ID NOs: 8-2035. In certain embodiments, the compound comprises (i) a first strand comprising a nucleobase sequence complementary to the site on HSD17B13 to which any of SEQ ID NOs: 8-2035 is targeted, and (ii) a second strand. In certain embodiments, the compound comprises one or more modified nucleotides in which the 2′ position of the sugar contains a halogen (such as fluorine group; 2′-F) or contains an alkoxy group (such as a methoxy group; 2′-OMe). In certain embodiments, the compound comprises at least one 2′-F sugar modification and at least one 2′-OMe sugar modification. In certain embodiments, the at least one 2′-F sugar modification and at least one 2′-OMe sugar modification are arranged in an alternating pattern for at least 2, 3, 4, 5, 6, 7, 8, 9, 10, 11, 12, 13, 14, 15, 16, 17, 18, 19, or 20 contiguous nucleobases along a strand of the dsRNA compound. In certain embodiments, the compound comprises one or more linkages between adjacent nucleotides other than a naturally-occurring phosphodiester linkage. Examples of such linkages include phosphoramide, phosphorothioate, and phosphorodithioate linkages. The compounds may also be chemically modified nucleic acid molecules as taught in U.S. Pat. No. 6,673,661. In other embodiments, the compound contains one or two capped strands, as disclosed, for example, by WO 00/63364, filed Apr. 19, 2000.

[0373] In certain embodiments, the first strand of the compound is an siRNA guide strand and the second strand of the compound is an siRNA passenger strand. In certain embodiments, the second strand of the compound is complementary to the first strand. In certain embodiments, each strand of the compound is 16, 17, 18, 19, 20, 21, 22, or 23 linked nucleosides in length. In certain embodiments, the first or second strand of the compound can comprise a conjugate group.

[0374] In certain embodiments, a compound described herein can comprise any of the oligonucleotide sequences targeted to HSD17B13 described herein. In certain embodiments, the compound is single stranded. In certain embodiments, such a compound is a single-stranded RNAi (ssRNAi) compound. In certain embodiments, the compound comprises at least an 8, 9, 10, 11, 12, 13, 14, 15, or 16 contiguous nucleobase portion of any one of SEQ ID NOs: 8-2035. In certain embodiments, the compound comprises the nucleobase sequence of any one of SEQ ID NOs: 8-2035. In certain embodiments, the compound comprises ribonucleotides in which uracil (U) is in place of thymine (T) in any one of SEQ ID NOs: 8-2035. In certain embodiments, the compound comprises a nucleobase sequence complementary to the site on HSD17B13 to which any of SEQ ID NOs: 8-2035 is targeted. In certain embodiments, the compound comprises one or more modified nucleotides in which the 2′ position in the sugar contains a halogen (such as fluorine group; 2′-F) or contains an alkoxy group (such as a methoxy group; 2′-OMe). In certain embodiments, the compound comprises at least one 2′-F sugar modification and at least one 2′-OMe sugar modification. In certain embodiments, the at least one 2′-F sugar modification and at least one 2′-OMe sugar modification are arranged in an alternating pattern for at least 2, 3, 4, 5, 6, 7, 8, 9, 10, 11, 12, 13, 14, 15, 16, 17, 18, 19, or 20 contiguous nucleobases along a strand of the compound. In certain embodiments, the compound comprises one or more linkages between adjacent nucleotides other than a naturally-occurring phosphodiester linkage. Examples of such linkages include phosphoramide, phosphorothioate, and phosphorodithioate linkages. The compounds may also be chemically modified nucleic acid molecules as taught in U.S. Pat. No. 6,673,661. In other embodiments, the compound contains a capped strand, as disclosed, for example, by WO 00/63364, filed Apr. 19, 2000. In certain embodiments, the compound consists of 16, 17, 18, 19, 20, 21, 22, or 23 linked nucleosides. In certain embodiments, the compound can comprise a conjugate group.

### Certain Mechanisms

[0375] In certain embodiments, compounds described herein comprise or consist of modified oligonucleotides. In certain embodiments, compounds described herein are antisense compounds. In certain embodiments, compounds comprise oligomeric compounds. In certain embodiments, compounds described herein are capable of hybridizing to a target nucleic acid, resulting in at least one antisense activity. In certain embodiments, compounds described herein selectively affect one or more target nucleic acid. Such compounds comprise a nucleobase sequence that hybridizes to one or more target nucleic acid, resulting in one or more desired antisense activity and does not hybridize to one or more non-target nucleic acid or does not hybridize to one or more non-target nucleic acid in such a way that results in a significant undesired antisense activity.

[0376] In certain antisense activities, hybridization of a compound described herein to a target nucleic acid results in recruitment of a protein that cleaves the target nucleic acid. For example, certain compounds described herein result in RNase H mediated cleavage of the target nucleic acid. RNase H is a cellular endonuclease that cleaves the RNA strand of an RNA:DNA duplex. The DNA in such an RNA:DNA duplex need not be unmodified DNA. In certain embodiments, compounds described herein are sufficiently “DNA-like” to elicit RNase H activity. Further, in certain embodiments, one or more non-DNA-like nucleoside in the gap of a gapmer is tolerated.

[0377] In certain antisense activities, compounds described herein or a portion of the compound is loaded into an RNA-induced silencing complex (RISC), ultimately resulting in cleavage of the target nucleic acid. For example, certain compounds described herein result in cleavage of the target nucleic acid by Argonaute. Compounds that are loaded into RISC are RNAi compounds. RNAi compounds may be double-stranded (siRNA) or single-stranded (ssRNA).

[0378] In certain embodiments, hybridization of compounds described herein to a target nucleic acid does not result in recruitment of a protein that cleaves that target nucleic acid. In certain such embodiments, hybridization of the compound to the target nucleic acid results in alteration of splicing of the target nucleic acid. In certain embodiments, hybridization of the compound to a target nucleic acid results in inhibition of a binding interaction between the target nucleic acid and a protein or other nucleic acid. In certain such embodiments, hybridization of the compound to a target nucleic acid results in alteration of translation of the target nucleic acid.

[0379] Antisense activities may be observed directly or indirectly. In certain embodiments, observation or detection of an antisense activity involves observation or detection of a change in an amount of a target nucleic acid or protein encoded by such target nucleic acid, a change in the ratio of splice variants of a nucleic acid or protein, and/or a phenotypic change in a cell or animal.

### Target Nucleic Acids, Target Regions and Nucleotide Sequences

[0380] In certain embodiments, compounds described herein comprise or consist of an oligonucleotide comprising a region that is complementary to a target nucleic acid. In certain embodiments, the target nucleic acid is an endogenous RNA molecule. In certain embodiments, the target nucleic acid encodes a protein. In certain such embodiments, the target nucleic acid is selected from an mRNA and a pre-mRNA, including intronic, exonic and untranslated regions. In certain embodiments, the target RNA is an mRNA. In certain embodiments, the target nucleic acid is a pre-mRNA. In certain such embodiments, the target region is entirely within an intron. In certain embodiments, the target region spans an intron/exon junction. In certain embodiments, the target region is at least 50% within an intron.

[0381] Nucleotide sequences that encode HSD17B13 include, without limitation, the following: RefSeq or GENBANK Accession No. NM_178135.4 (incorporated by reference, disclosed herein as SEQ ID NO: 1), the complement of GENBANK Accession No. NC_000004.12 truncated from nucleotides 87301001 to U.S. Pat. No. 87,326,000 (incorporated by reference, disclosed herein as SEQ ID NO: 2), the sequence listed as SEQ ID NO: 3, or GENBANK Accession No. NM_001136230.2 (incorporated by reference, disclosed herein as SEQ ID NO: 4).

### Hybridization

[0382] In some embodiments, hybridization occurs between a compound disclosed herein and a HSD17B13 nucleic acid. The most common mechanism of hybridization involves hydrogen bonding (e.g., Watson-Crick, Hoogsteen or reversed Hoogsteen hydrogen bonding) between complementary nucleobases of the nucleic acid molecules.

[0383] Hybridization can occur under varying conditions. Hybridization conditions are sequence-dependent and are determined by the nature and composition of the nucleic acid molecules to be hybridized.

[0384] Methods of determining whether a sequence is specifically hybridizable to a target nucleic acid are well known in the art. In certain embodiments, the compounds provided herein are specifically hybridizable with a HSD17B13 nucleic acid.

### Complementarity

[0385] An oligonucleotide is said to be complementary to another nucleic acid when the nucleobase sequence of such oligonucleotide or one or more regions thereof matches the nucleobase sequence of another oligonucleotide or nucleic acid or one or more regions thereof when the two nucleobase sequences are aligned in opposing directions. Nucleobase matches or complementary nucleobases, as described herein, are limited to the following pairs: adenine (A) and thymine (T), adenine (A) and uracil (U), cytosine (C) and guanine (G), and 5-methyl cytosine (mC) and guanine (G), unless otherwise specified. Complementary oligonucleotides and/or nucleic acids need not have nucleobase complementarity at each nucleoside and may include one or more nucleobase mismatches. An oligonucleotide is fully complementary or 100% complementary when such oligonucleotides have nucleobase matches at each nucleoside without any nucleobase mismatches.

[0386] In certain embodiments, compounds described herein comprise or consist of modified oligonucleotides. In certain embodiments, compounds described herein are antisense compounds. In certain embodiments, compounds comprise oligomeric compounds. Non-complementary nucleobases between a compound and a HSD17B13 nucleic acid may be tolerated provided that the compound remains able to specifically hybridize to a target nucleic acid. Moreover, a compound may hybridize over one or more segments of a HSD17B13 nucleic acid such that intervening or adjacent segments are not involved in the hybridization event (e.g., a loop structure, mismatch or hairpin structure).

[0387] In certain embodiments, the compounds provided herein, or a specified portion thereof are at least, or are up to 70%, 80%, 85%, 86%, 87%, 88%, 89%, 90%, 91%, 92%, 93%, 94%, 95%, 96%, 97%, 98%, 99%, or 100% complementary to a HSD17B13 nucleic acid, a target region, target segment, or specified portion thereof. In certain embodiments, the compounds provided herein, or a specified portion thereof, are 70% to 75%, 75% to 80%, 80% to 85%, 85% to 90%, 90% to 95%, 95% to 100%, or any number in between these ranges, complementary to a HSD17B13 nucleic acid, a target region, target segment, or specified portion thereof. Percent complementarity of a compound with a target nucleic acid can be determined using routine methods.

[0388] For example, a compound in which 18 of 20 nucleobases of the compound are complementary to a target region, and would therefore specifically hybridize, would represent 90 percent complementarity. In this example, the remaining non-complementary nucleobases may be clustered or interspersed with complementary nucleobases and need not be contiguous to each other or to complementary nucleobases. As such, a compound which is 18 nucleobases in length having four non-complementary nucleobases which are flanked by two regions of complete complementarity with the target nucleic acid would have 77.8% overall complementarity with the target nucleic acid. Percent complementarity of a compound with a region of a target nucleic acid can be determined routinely using BLAST programs (basic local alignment search tools) and PowerBLAST programs known in the art (Altschul et al., J. Mol. Biol., 1990, 215, 403 410; Zhang and Madden, Genome Res., 1997, 7, 649 656). Percent homology, sequence identity or complementarity, can be determined by, for example, the Gap program (Wisconsin Sequence Analysis Package, Version 8 for Unix, Genetics Computer Group, University Research Park, Madison Wis.), using default settings, which uses the algorithm of Smith and Waterman (Adv. Appl. Math., 1981, 2, 482 489).

[0389] In certain embodiments, compounds described herein, or specified portions thereof, are fully complementary (i.e. 100% complementary) to a target nucleic acid, or specified portion thereof. For example, a compound may be fully complementary to a HSD17B13 nucleic acid, or a target region, or a target segment or target sequence thereof. As used herein, “fully complementary” means each nucleobase of a compound is complementary to the corresponding nucleobase of a target nucleic acid. For example, a 20 nucleobase compound is fully complementary to a target sequence that is 400 nucleobases long, so long as there is a corresponding 20 nucleobase portion of the target nucleic acid that is fully complementary to the compound. “Fully complementary” can also be used in reference to a specified portion of the first and/or the second nucleic acid. For example, a 20 nucleobase portion of a 30 nucleobase compound can be “fully complementary” to a target sequence that is 400 nucleobases long. The 20 nucleobase portion of the 30 nucleobase compound is fully complementary to the target sequence if the target sequence has a corresponding 20 nucleobase portion wherein each nucleobase is complementary to the 20 nucleobase portion of the compound. At the same time, the entire 30 nucleobase compound may or may not be fully complementary to the target sequence, depending on whether the remaining 10 nucleobases of the compound are also complementary to the target sequence.

[0390] In certain embodiments, compounds described herein comprise one or more mismatched nucleobases relative to the target nucleic acid. In certain such embodiments, antisense activity against the target is reduced by such mismatch, but activity against a non-target is reduced by a greater amount. Thus, in certain such embodiments, selectivity of the compound is improved. In certain embodiments, the mismatch is specifically positioned within an oligonucleotide having a gapmer motif. In certain such embodiments, the mismatch is at position 1, 2, 3, 4, 5, 6, 7, or 8 from the 5′-end of the gap region. In certain such embodiments, the mismatch is at position 9, 8, 7, 6, 5, 4, 3, 2, 1 from the 3′-end of the gap region. In certain such embodiments, the mismatch is at position 1, 2, 3, or 4 from the 5′-end of the wing region. In certain such embodiments, the mismatch is at position 4, 3, 2, or 1 from the 3′-end of the wing region. In certain embodiments, the mismatch is specifically positioned within an oligonucleotide not having a gapmer motif. In certain such embodiments, the mismatch is at position 1, 2, 3, 4, 5, 6, 7, 8, 9, 10, 11, or 12 from the 5′-end of the oligonucleotide. In certain such embodiments, the mismatch is at position, 2, 3, 4, 5, 6, 7, 8, 9, 10, 11, or 12 from the 3′-end of the oligonucleotide.

[0391] The location of a non-complementary nucleobase may be at the 5′ end or 3′ end of the compound. Alternatively, the non-complementary nucleobase or nucleobases may be at an internal position of the compound. When two or more non-complementary nucleobases are present, they may be contiguous (i.e. linked) or non-contiguous. In one embodiment, a non-complementary nucleobase is located in the wing segment of a gapmer oligonucleotide.

[0392] In certain embodiments, compounds described herein that are, or are up to 11, 12, 13, 14, 15, 16, 17, 18, 19, or 20 nucleobases in length comprise no more than 4, no more than 3, no more than 2, or no more than 1 non-complementary nucleobase(s) relative to a target nucleic acid, such as a HSD17B13 nucleic acid, or specified portion thereof.

[0393] In certain embodiments, compounds described herein that are, or are up to 11, 12, 13, 14, 15, 16, 17, 18, 19, 20, 21, 22, 23, 24, 25, 26, 27, 28, 29, or 30 nucleobases in length comprise no more than 6, no more than 5, no more than 4, no more than 3, no more than 2, or no more than 1 non-complementary nucleobase(s) relative to a target nucleic acid, such as a HSD17B13 nucleic acid, or specified portion thereof.

[0394] In certain embodiments, compounds described herein also include those which are complementary to a portion of a target nucleic acid. As used herein, “portion” refers to a defined number of contiguous (i.e. linked) nucleobases within a region or segment of a target nucleic acid. A “portion” can also refer to a defined number of contiguous nucleobases of a compound. In certain embodiments, the compounds, are complementary to at least an 8 nucleobase portion of a target segment. In certain embodiments, the compounds are complementary to at least a 9 nucleobase portion of a target segment. In certain embodiments, the compounds are complementary to at least a 10 nucleobase portion of a target segment. In certain embodiments, the compounds are complementary to at least an 11 nucleobase portion of a target segment. In certain embodiments, the compounds are complementary to at least a 12 nucleobase portion of a target segment. In certain embodiments, the compounds are complementary to at least a 13 nucleobase portion of a target segment. In certain embodiments, the compounds are complementary to at least a 14 nucleobase portion of a target segment. In certain embodiments, the compounds are complementary to at least a 15 nucleobase portion of a target segment. In certain embodiments, the compounds are complementary to at least a 16 nucleobase portion of a target segment. Also contemplated are compounds that are complementary to at least a 9, 10, 17, 18, 19, 20, or more nucleobase portion of a target segment, or a range defined by any two of these values.

### Identity

[0395] The compounds provided herein may also have a defined percent identity to a particular nucleotide sequence, SEQ ID NO, or compound represented by a specific ION number, or portion thereof. In certain embodiments, compounds described herein are antisense compounds or oligomeric compounds. In certain embodiments, compounds described herein are modified oligonucleotides. As used herein, a compound is identical to the sequence disclosed herein if it has the same nucleobase pairing ability. For example, a RNA which contains uracil in place of thymidine in a disclosed DNA sequence would be considered identical to the DNA sequence since both uracil and thymidine pair with adenine. Shortened and lengthened versions of the compounds described herein as well as compounds having non-identical bases relative to the compounds provided herein also are contemplated. The non-identical bases may be adjacent to each other or dispersed throughout the compound. Percent identity of an compound is calculated according to the number of bases that have identical base pairing relative to the sequence to which it is being compared.

[0396] In certain embodiments, compounds described herein, or portions thereof, are, or are at least, 70%, 75%, 80%, 85%, 90%, 91%, 92%, 93%, 94%, 95%, 96%, 97%, 98%, 99% or 100% identical to one or more of the compounds or SEQ ID NOs, or a portion thereof, disclosed herein. In certain embodiments, compounds described herein are about 70%, 75%, 80%, 85%, 90%, 91%, 92%, 93%, 94%, 95%, 96%, 97%, 98%, or 99% identical, or any percentage between such values, to a particular nucleotide sequence, SEQ ID NO, or compound represented by a specific ION number, or portion thereof, in which the compounds comprise an oligonucleotide having one or more mismatched nucleobases. In certain such embodiments, the mismatch is at position 1, 2, 3, 4, 5, 6, 7, 8, 9, 10, 11, or 12 from the 5′-end of the oligonucleotide. In certain such embodiments, the mismatch is at position, 2, 3, 4, 5, 6, 7, 8, 9, 10, 11, or 12 from the 3′-end of the oligonucleotide.

[0397] In certain embodiments, compounds described herein comprise or consist of antisense compounds. In certain embodiments, a portion of the antisense compound is compared to an equal length portion of the target nucleic acid. In certain embodiments, an 8, 9, 10, 11, 12, 13, 14, 15, 16, 17, 18, 19, 20, 21, 22, 23, 24, or 25 nucleobase portion is compared to an equal length portion of the target nucleic acid.

[0398] In certain embodiments, compounds described herein comprise or consist of oligonucleotides. In certain embodiments, a portion of the oligonucleotide is compared to an equal length portion of the target nucleic acid. In certain embodiments, an 8, 9, 10, 11, 12, 13, 14, 15, 16, 17, 18, 19, 20, 21, 22, 23, 24, or 25 nucleobase portion is compared to an equal length portion of the target nucleic acid.

### Certain Modified Compounds

[0399] In certain embodiments, compounds described herein comprise or consist of oligonucleotides consisting of linked nucleosides. Oligonucleotides may be unmodified oligonucleotides (RNA or DNA) or may be modified oligonucleotides. Modified oligonucleotides comprise at least one modification relative to unmodified RNA or DNA (i.e., comprise at least one modified nucleoside (comprising a modified sugar moiety and/or a modified nucleobase) and/or at least one modified internucleoside linkage).

### A. Modified Nucleosides

[0400] Modified nucleosides comprise a modified sugar moiety or a modified nucleobase or both a modified sugar moiety and a modified nucleobase.

[0401] 1. Modified Sugar Moieties

[0402] In certain embodiments, sugar moieties are non-bicyclic modified sugar moieties. In certain embodiments, modified sugar moieties are bicyclic or tricyclic sugar moieties. In certain embodiments, modified sugar moieties are sugar surrogates. Such sugar surrogates may comprise one or more substitutions corresponding to those of other types of modified sugar moieties.

[0403] In certain embodiments, modified sugar moieties are non-bicyclic modified furanosyl sugar moieties comprising one or more acyclic substituent, including, but not limited, to substituents at the 2′, 4′, and/or 5′ positions. In certain embodiments, the furanosyl sugar moiety is a ribosyl sugar moiety. In certain embodiments, one or more acyclic substituent of non-bicyclic modified sugar moieties is branched. Examples of 2′-substituent groups suitable for non-bicyclic modified sugar moieties include but are not limited to: 2′-F, 2′-OCH₃ (“OMe” or “O-methyl”), and 2′-O(CH₂)₂OCH₃ (“MOE”). In certain embodiments, 2′-substituent groups are selected from among: halo, allyl, amino, azido, SH, CN, OCN, CF₃, OCF₃, O—C₁-C₁₀ alkoxy, O—C₁-C₁₀ substituted alkoxy, O—C₁-C₁₀ alkyl, O—C₁-C₁₀ substituted alkyl, S-alkyl, N(Rₘ)-alkyl, O-alkenyl, S-alkenyl, N(Rₘ)-alkenyl, O-alkynyl, S-alkynyl, N(Rₘ)-alkynyl, O-alkylenyl-O-alkyl, alkynyl, alkaryl, aralkyl, O-alkaryl, O-aralkyl, O(CH₂)₂SCH₃, O(CH₂)₂ON(Rₘ)(Rₙ) or OCH₂C(═O)—N(Rₘ)(Rₙ), where each Rₘ and Rₙ is, independently, H, an amino protecting group, or substituted or unsubstituted C₁-C₁₀ alkyl, and the 2′-substituent groups described in Cook et al., U.S. Pat. No. 6,531,584; Cook et al., U.S. Pat. No. 5,859,221; and Cook et al., U.S. Pat. No. 6,005,087. Certain embodiments of these 2′-substituent groups can be further substituted with one or more substituent groups independently selected from among: hydroxyl, amino, alkoxy, carboxy, benzyl, phenyl, nitro (NO₂), thiol, thioalkoxy, thioalkyl, halogen, alkyl, aryl, alkenyl and alkynyl. Examples of 4′-substituent groups suitable for linearly non-bicyclic modified sugar moieties include, but are not limited to, alkoxy (e.g., methoxy), alkyl, and those described in Manoharan et al., WO 2015/106128. Examples of 5′-substituent groups suitable for non-bicyclic modified sugar moieties include, but are not limited to: 5′-methyl (R or S), 5′-vinyl, and 5′-methoxy. In certain embodiments, non-bicyclic modified sugars comprise more than one non-bridging sugar substituent, for example, 2′-F-5′-methyl sugar moieties and the modified sugar moieties and modified nucleosides described in Migawa et al., WO 2008/101157 and Rajeev et al., US2013/0203836.

[0404] In certain embodiments, a 2′-substituted nucleoside or 2′-non-bicyclic modified nucleoside comprises a sugar moiety comprising a linear 2′-substituent group selected from: F, NH₂, N₃, OCF₃, OCH₃, O(CH₂)₃NH₂, CH₂CH═CH₂, OCH₂CH═CH₂, OCH₂CH₂OCH₃, O(CH₂)₂SCH₃, O(CH₂)₂ON(Rₘ)(Rₙ), O(CH₂)₂O(CH₂)₂N(CH₃)₂, and N-substituted acetamide (OCH₂C(═O)—N(Rₘ)(Rₙ), where each Rₘ and Rₙ is, independently, H, an amino protecting group, or substituted or unsubstituted C₁-C₁₀ alkyl.

[0405] In certain embodiments, a 2′-substituted nucleoside or 2′-non-bicyclic modified nucleoside comprises a sugar moiety comprising a linear 2′-substituent group selected from: F, OCF₃, OCH₃, OCH₂CH₂OCH₃, O(CH₂)₂SCH₃, O(CH₂)₂ON(CH₃)₂, O(CH₂)₂O(CH₂)₂N(CH₃)₂, and OCH₂C(═O)—N(H)CH₃ (“NMA”).

[0406] In certain embodiments, a 2′-substituted nucleoside or 2′-non-bicyclic modified nucleoside comprises a sugar moiety comprising a linear 2′-substituent group selected from: F, OCH₃, and OCH₂CH₂OCH₃.

[0407] Nucleosides comprising modified sugar moieties, such as non-bicyclic modified sugar moieties, are referred to by the position(s) of the substitution(s) on the sugar moiety of the nucleoside. For example, nucleosides comprising 2′-substituted or 2′-modified sugar moieties are referred to as 2′-substituted nucleosides or 2′-modified nucleosides.

[0408] Certain modified sugar moieties comprise a bridging sugar substituent that forms a second ring resulting in a bicyclic sugar moiety. In certain such embodiments, the bicyclic sugar moiety comprises a bridge between the 4′ and the 2′ furanose ring atoms. In certain such embodiments, the furanose ring is a ribose ring. Examples of such 4′ to 2′ bridging sugar substituents include, but are not limited to: 4′-CH₂-2′, 4′-(CH₂)₂-2′, 4′-(CH₂)₃-2′, 4′-CH₂—O-2′ (“LNA”), 4′-CH₂—S-2′, 4′-(CH₂)₂—O-2′ (“ENA”), 4′-CH(CH₃)—O-2′ (referred to as “constrained ethyl” or “cEt” when in the S configuration), 4′-CH₂—O—CH₂-2′, 4′-CH₂—N(R)-2′, 4′-CH(CH₂OCH₃)—O-2′ (“constrained MOE” or “cMOE”) and analogs thereof (see, e.g., Seth et al., U.S. Pat. No. 7,399,845, Bhat et al., U.S. Pat. No. 7,569,686, Swayze et al., U.S. Pat. No. 7,741,457, and Swayze et al., U.S. Pat. No. 8,022,193), 4′-C(CH₃)(CH₃)—O-2′ and analogs thereof (see, e.g., Seth et al., U.S. Pat. No. 8,278,283), 4′-CH₂—N(OCH₃)-2′ and analogs thereof (see, e.g., Prakash et al., U.S. Pat. No. 8,278,425), 4′-CH₂—O—N(CH₃)-2′ (see, e.g., Allerson et al., U.S. Pat. No. 7,696,345 and Allerson et al., U.S. Pat. No. 8,124,745), 4′-CH₂—C(H)(CH₃)-2′ (see, e.g., Zhou, et al., J. Org. Chem., 2009, 74, 118-134), 4′-CH₂—C(═CH₂)-2′ and analogs thereof (see e.g., Seth et al., U.S. Pat. No. 8,278,426), 4′-C(RₐR_{b})—N(R)—O-2′, 4′-C(RₐR_{b})—O—N(R)-2′, 4′-CH₂—O—N(R)-2′, and 4′-CH₂—N(R)—O-2′, wherein each R, Rₐ, and R_{b} is, independently, H, a protecting group, or C₁-C₁₂ alkyl (see, e.g. Imanishi et al., U.S. Pat. No. 7,427,672).

[0409] In certain embodiments, such 4′ to 2′ bridges independently comprise from 1 to 4 linked groups independently selected from: —[C(Rₐ)(R_{b})]ₙ—, —[C(Rₐ)(R_{b})]ₙ—O—, —C(Rₙ)═C(R_{b})—, —C(Rₐ)═N—, —C(═NRₐ)—, —C(═O)—, —C(═S)—, —O—, —Si(Rₐ)₂—, —S(═O)ₓ—, and —N(Rₐ)—;

[0410] wherein:

[0411] x is 0, 1, or 2;

[0412] n is 1, 2, 3, or 4;

[0413] each Rₐ and R_{b} is, independently, H, a protecting group, hydroxyl, C₁-C₁₂ alkyl, substituted C₁-C₁₂ alkyl, C₂-C₁₂ alkenyl, substituted C₂-C₁₂ alkenyl, C₂-C₁₂ alkynyl, substituted C₂-C₁₂ alkynyl, C₅-C₂₀ aryl, substituted C₅-C₂₀ aryl, heterocycle radical, substituted heterocycle radical, heteroaryl, substituted heteroaryl, C₅-C₇ alicyclic radical, substituted C₅-C₇ alicyclic radical, halogen, OJ₁, NJ₁J₂, SJ₁, N₃, COOJ₁, acyl (C(═O)—H), substituted acyl, CN, sulfonyl (S(═O)₂-J₁), or sulfoxyl (S(═O)-J₁); and each J₁ and J₂ is, independently, H, C₁-C₁₂ alkyl, substituted C₁-C₁₂ alkyl, C₂-C₁₂ alkenyl, substituted C₂-C₁₂ alkenyl, C₂-C₁₂ alkynyl, substituted C₂-C₁₂ alkynyl, C₅-C₂₀ aryl, substituted C₅-C₂₀ aryl, acyl (C(═O)—H), substituted acyl, a heterocycle radical, a substituted heterocycle radical, C₁-C₁₂ aminoalkyl, substituted C₁-C₁₂ aminoalkyl, or a protecting group.

[0414] Additional bicyclic sugar moieties are known in the art, see, for example: Freier et al., Nucleic Acids Research, 1997, 25(22), 4429-4443, Albaek et al., J. Org. Chem., 2006, 71, 7731-7740, Singh et al., Chem. Commun., 1998, 4, 455-456; Koshkin et al., Tetrahedron, 1998, 54, 3607-3630; Wahlestedt et al., Proc. Natl. Acad. Sci. U S. A., 2000, 97, 5633-5638; Kumar et al., Bioorg. Med. Chem. Lett., 1998, 8, 2219-2222; Singh et al., J. Org. Chem., 1998, 63, 10035-10039; Srivastava et al., J. Am. Chem. Soc., 2007, 129, 8362-8379; Elayadi et al., Curr. Opinion Invens. Drugs, 2001, 2, 558-561; Braasch et al., Chem. Biol., 2001, 8, 1-7; Orum et al., Curr. Opinion Mol. Ther., 2001, 3, 239-243; Wengel et al., U.S. Pat. No. 7,053,207, Imanishi et al., U.S. Pat. No. 6,268,490, Imanishi et al. U.S. Pat. No. 6,770,748, Imanishi et al., U.S. RE44,779; Wengel et al., U.S. Pat. No. 6,794,499, Wengel et al., U.S. Pat. No. 6,670,461; Wengel et al., U.S. Pat. No. 7,034,133, Wengel et al., U.S. Pat. No. 8,080,644; Wengel et al., U.S. Pat. No. 8,034,909; Wengel et al., U.S. Pat. No. 8,153,365; Wengel et al., U.S. Pat. No. 7,572,582; and Ramasamy et al., U.S. Pat. No. 6,525,191, Torsten et al., WO 2004/106356, Wengel et al., WO 1999/014226; Seth et al., WO 2007/134181; Seth et al., U.S. Pat. No. 7,547,684; Seth et al., U.S. Pat. No. 7,666,854; Seth et al., U.S. Pat. No. 8,088,746; Seth et al., U.S. Pat. No. 7,750,131; Seth et al., U.S. Pat. No. 8,030,467; Seth et al., U.S. Pat. No. 8,268,980; Seth et al., U.S. Pat. No. 8,546,556; Seth et al., U.S. Pat. No. 8,530,640; Migawa et al., U.S. Pat. No. 9,012,421; Seth et al., U.S. Pat. No. 8,501,805; Allerson et al., US2008/0039618; and Migawa et al., US2015/0191727.

[0415] In certain embodiments, bicyclic sugar moieties and nucleosides incorporating such bicyclic sugar moieties are further defined by isomeric configuration. For example, an LNA nucleoside (described herein) may be in the α-L configuration or in the β-D configuration.

[chemical structure]

α-L-methyleneoxy (4′-CH₂—O-2′) or α-L-LNA bicyclic nucleosides have been incorporated into oligonucleotides that showed antisense activity (Frieden et al., Nucleic Acids Research, 2003, 21, 6365-6372). Herein, general descriptions of bicyclic nucleosides include both isomeric configurations. When the positions of specific bicyclic nucleosides (e.g., LNA or cEt) are identified in exemplified embodiments herein, they are in the β-D configuration, unless otherwise specified.

[0416] In certain embodiments, modified sugar moieties comprise one or more non-bridging sugar substituent and one or more bridging sugar substituent (e.g., 5′-substituted and 4′-2′ bridged sugars).

[0417] In certain embodiments, modified sugar moieties are sugar surrogates. In certain such embodiments, the oxygen atom of the sugar moiety is replaced, e.g., with a sulfur, carbon or nitrogen atom. In certain such embodiments, such modified sugar moieties also comprise bridging and/or non-bridging substituents as described herein. For example, certain sugar surrogates comprise a 4′-sulfur atom and a substitution at the 2′-position (see, e.g., Bhat et al., U.S. Pat. No. 7,875,733 and Bhat et al., U.S. Pat. No. 7,939,677) and/or the 5′ position.

[0418] In certain embodiments, sugar surrogates comprise rings having other than 5 atoms. For example, in certain embodiments, a sugar surrogate comprises a six-membered tetrahydropyran (“THP”). Such tetrahydropyrans may be further modified or substituted. Nucleosides comprising such modified tetrahydropyrans include, but are not limited to, hexitol nucleic acid (“HNA”), anitol nucleic acid (“ANA”), manitol nucleic acid (“MNA”) (see e.g., Leumann, C J. Bioorg. & Med. Chem. 2002, 10, 841-854), fluoro HNA:

[chemical structure]

(“F-HNA”, see e.g., Swayze et al., U.S. Pat. No. 8,088,904; Swayze et al., U.S. Pat. No. 8,440,803; and Swayze et al., U.S. 9,005,906) F-HNA can also be referred to as a F-THP or 3′-fluoro tetrahydropyran, and nucleosides comprising additional modified THP compounds having the formula:

[chemical structure]

wherein, independently, for each of said modified THP nucleoside:

[0419] Bx is a nucleobase moiety;

[0420] T₃ and T₄ are each, independently, an internucleoside linking group linking the modified THP nucleoside to the remainder of an oligonucleotide or one of T₃ and T₄ is an internucleoside linking group linking the modified THP nucleoside to the remainder of an oligonucleotide and the other of T₃ and T₄ is H, a hydroxyl protecting group, a linked conjugate group, or a 5′ or 3′-terminal group; q₁, q₂, q₃, q₄, q₅, q₆ and q₇ are each, independently, H, C₁-C₆ alkyl, substituted C₁-C₆ alkyl, C₂-C₆ alkenyl, substituted C₂-C₆ alkenyl, C₂-C₆ alkynyl, or substituted C₂-C₆ alkynyl; and each of R₁ and R₂ is independently selected from among: hydrogen, halogen, substituted or unsubstituted alkoxy, NJ₁J₂, SJ₁, N₃, OC(═X)J₁, OC(═X)NJ₁J₂, NJ₃C(═X)NJ₁J₂, and CN, wherein X is O, S or NJ₁, and each J₁, J₂, and J₃ is, independently, H or C₁-C₆ alkyl.

[0421] In certain embodiments, modified THP nucleosides are provided wherein q₁, q₂, q₃, q₄, q₅, q₆ and q₇ are each H. In certain embodiments, at least one of q₁, q₂, q₃, q₄, q₅, q₆ and q₇ is other than H. In certain embodiments, at least one of q₁, q₂, q₃, q₄, q₅, q₆ and q₇ is methyl. In certain embodiments, modified THP nucleosides are provided wherein one of R₁ and R₂ is F. In certain embodiments, R₁ is F and R₂ is H, in certain embodiments, R₁ is methoxy and R₂ is H, and in certain embodiments, R₁ is methoxyethoxy and R₂ is H.

[0422] In certain embodiments, sugar surrogates comprise rings having more than 5 atoms and more than one heteroatom. For example, nucleosides comprising morpholino sugar moieties and their use in oligonucleotides have been reported (see, e.g., Braasch et al., Biochemistry, 2002, 41, 4503-4510 and Summerton et al., U.S. Pat. No. 5,698,685; Summerton et al., U.S. Pat. No. 5,166,315; Summerton et al., U.S. Pat. No. 5,185,444; and Summerton et al., U.S. Pat. No. 5,034,506). As used here, the term “morpholino” means a sugar surrogate having the following structure:

[chemical structure]

In certain embodiments, morpholinos may be modified, for example, by adding or altering various substituent groups from the above morpholino structure. Such sugar surrogates are referred to herein as “modified morpholinos.”

[0423] In certain embodiments, sugar surrogates comprise acyclic moieties. Examples of nucleosides and oligonucleotides comprising such acyclic sugar surrogates include, but are not limited to: peptide nucleic acid (“PNA”), acyclic butyl nucleic acid (see, e.g., Kumar et al., Org. Biomol. Chem., 2013, 11, 5853-5865), and nucleosides and oligonucleotides described in Manoharan et al., US2013/130378.

[0424] Many other bicyclic and tricyclic sugar and sugar surrogate ring systems are known in the art that can be used in modified nucleosides.

[0425] In certain embodiments, modified oligonucleotides comprise a 2′-OMe modified nucleoside in the gap of a cEt gapmer. In certain embodiments, the 2′-OMe modified nucleoside is at position 2 or 3 of the gap. In certain embodiments, the 2′-OMe modified nucleoside is at position 2 of the gap. In certain embodiments, modified oligonucleotides have a sugar motif kkkdmddddddddkkk, wherein each k represents a cEt nucleoside, each d represents a 2′-β-D-deoxyribosyl mucleoside, and each m represents a nucleoside comprising a 2′-OMe sugar moiety (“2′-OMe nucleoside”).

[0426] In certain embodiments, modified oligonucleotides have a formula A-B-C, wherein A is a 5′-region, B is a central region, and C is a 3′-region. In certain embodiments, A and C each consist of 1-5 linked nucleosides and B consists of 7-11 linked nucleosides. In certain embodiments, A and C consist of 3 linked cEt nucleosides. In certain embodiments, the second nucleoside of the central region comprises a 2′-OMe modified sugar moiety, and each of the remaining central region nucleosides comprises a 2′-β-D-deoxyribosyl sugar moiety.

[0427] In certain embodiments, modified oligonucleotides comprise a neutral phosphonate linkage at one or more positions. In certain embodiments, modified oligonucleotides comprise a methoxypropyl phosphonate linkage at one or more positions. In certain embodiments, the sugar motif of a modified oligonucleotide is a gapmer, and the internucleoside linkage motif comprises at least one methoxypropyl phosphonate linkage in the gap. In certain embodiments, the methoxypropyl phosphonate linkage is between the second and third nucleosides in the gap. In certain embodiments, the methoxypropyl phosphonate linkage is between the third and fourth nucleosides in the gap.

[0428] 2. Modified Nucleobases

[0429] Nucleobase (or base) modifications or substitutions are structurally distinguishable from, yet functionally interchangeable with, naturally occurring or synthetic unmodified nucleobases. Both natural and modified nucleobases are capable of participating in hydrogen bonding. Such nucleobase modifications can impart nuclease stability, binding affinity or some other beneficial biological property to antisense compounds.

[0430] In certain embodiments, compounds described herein comprise modified oligonucleotides. In certain embodiments, modified oligonucleotides comprise one or more nucleoside comprising an unmodified nucleobase. In certain embodiments, modified oligonucleotides comprise one or more nucleoside comprising a modified nucleobase. In certain embodiments, modified oligonucleotides comprise one or more nucleosides that does not comprise a nucleobase, referred to as an abasic nucleoside.

[0431] In certain embodiments, modified nucleobases are selected from: 5-substituted pyrimidines, 6-azapyrimidines, alkyl or alkynyl substituted pyrimidines, alkyl substituted purines, and N-2, N-6 and 0-6 substituted purines. In certain embodiments, modified nucleobases are selected from: 2-aminopropyladenine, 5-hydroxymethyl cytosine, 5-methylcytosine, xanthine, hypoxanthine, 2-aminoadenine, 6-N-methylguanine, 6-N-methyladenine, 2-propyladenine, 2-thiouracil, 2-thiothymine and 2-thiocytosine, 5-propynyl (C≡C—CH₃) uracil, 5-propynylcytosine, 6-azouracil, 6-azocytosine, 6-azothymine, 5-ribosyluracil (pseudouracil), 4-thiouracil, 8-halo, 8-amino, 8-thiol, 8-thioalkyl, 8-hydroxyl, 8-aza and other 8-substituted purines, 5-halo, particularly, 5-bromo, 5-trifluoromethyl, 5-halouracil, and 5-halocytosine, 7-methylguanine, 7-methyladenine, 2-F-adenine, 2-aminoadenine, 7-deazaguanine, 7-deazaadenine, 3-deazaguanine, 3-deazaadenine, 6-N-benzoyladenine, 2-N-isobutyrylguanine, 4-N-benzoylcytosine, 4-N-benzoyluracil, 5-methyl 4-N-benzoylcytosine, 5-methyl 4-N-benzoyluracil, universal bases, hydrophobic bases, promiscuous bases, size-expanded bases, and fluorinated bases. Further modified nucleobases include tricyclic pyrimidines, such as 1,3-diazaphenoxazine-2-one, 1,3-diazaphenothiazine-2-one, and 9-(2-aminoethoxy)-1,3-diazaphenoxazine-2-one (G-clamp). Modified nucleobases may also include those in which the purine or pyrimidine base is replaced with other heterocycles, for example, 7-deaza-adenine, 7-deazaguanosine, 2-aminopyridine and 2-pyridone. Further nucleobases include those disclosed in Merigan et al., U.S. Pat. No. 3,687,808, those disclosed in The Concise Encyclopedia Of Polymer Science And Engineering, Kroschwitz, J. I., Ed., John Wiley & Sons, 1990, 858-859; Englisch et al., Angewandte Chemie, International Edition, 1991, 30, 613; Sanghvi, Y. S., Chapter 15, Antisense Research and Applications, Crooke, S. T. and Lebleu, B., Eds., CRC Press, 1993, 273-288; and those disclosed in Chapters 6 and 15, Antisense Drug Technology, Crooke S. T., Ed., CRC Press, 2008, 163-166 and 442-443.

[0432] Publications that teach the preparation of certain of the above noted modified nucleobases, as well as other modified nucleobases include without limitation, Manoharan et al., US2003/0158403, Manoharan et al., US2003/0175906; Dinh et al., U.S. Pat. No. 4,845,205; Spielvogel et al., U.S. Pat. No. 5,130,302; Rogers et al., U.S. Pat. No. 5,134,066; Bischofberger et al., U.S. Pat. No. 5,175,273; Urdea et al., U.S. Pat. No. 5,367,066; Benner et al., U.S. Pat. No. 5,432,272; Matteucci et al., U.S. Pat. No. 5,434,257; Gmeiner et al., U.S. Pat. No. 5,457,187; Cook et al., U.S. Pat. No. 5,459,255; Froehler et al., U.S. Pat. No. 5,484,908; Matteucci et al., U.S. Pat. No. 5,502,177; Hawkins et al., U.S. Pat. No. 5,525,711; Haralambidis et al., U.S. Pat. No. 5,552,540; Cook et al., U.S. Pat. No. 5,587,469; Froehler et al., U.S. Pat. No. 5,594,121; Switzer et al., U.S. Pat. No. 5,596,091; Cook et al., U.S. Pat. No. 5,614,617; Froehler et al., U.S. Pat. No. 5,645,985; Cook et al., U.S. Pat. No. 5,681,941; Cook et al., U.S. Pat. No. 5,811,534; Cook et al., U.S. Pat. No. 5,750,692; Cook et al., U.S. Pat. No. 5,948,903; Cook et al., U.S. Pat. No. 5,587,470; Cook et al., U.S. Pat. No. 5,457,191; Matteucci et al., U.S. Pat. No. 5,763,588; Froehler et al., U.S. Pat. No. 5,830,653; Cook et al., U.S. Pat. No. 5,808,027; Cook et al., U.S. Pat. No. 6,166,199; and Matteucci et al., U.S. Pat. No. 6,005,096.

[0433] In certain embodiments, compounds targeted to a HSD17B13 nucleic acid comprise one or more modified nucleobases. In certain embodiments, the modified nucleobase is 5-methylcytosine. In certain embodiments, each cytosine is a 5-methylcytosine.

[0434] Modified Internucleoside Linkages

[0435] The naturally occurring internucleoside linkage of RNA and DNA is a 3′ to 5′ phosphodiester linkage. In certain embodiments, compounds described herein having one or more modified, i.e. non-naturally occurring, internucleoside linkages are often selected over compounds having naturally occurring internucleoside linkages because of desirable properties such as, for example, enhanced cellular uptake, enhanced affinity for target nucleic acids, and increased stability in the presence of nucleases.

[0436] Representative internucleoside linkages having a chiral center include but are not limited to alkylphosphonates and phosphorothioates. Modified oligonucleotides comprising internucleoside linkages having a chiral center can be prepared as populations of modified oligonucleotides comprising stereorandom internucleoside linkages, or as populations of modified oligonucleotides comprising phosphorothioate linkages in particular stereochemical configurations. In certain embodiments, populations of modified oligonucleotides comprise phosphorothioate internucleoside linkages wherein all of the phosphorothioate internucleoside linkages are stereorandom. Such modified oligonucleotides can be generated using synthetic methods that result in random selection of the stereochemical configuration of each phosphorothioate linkage. Nonetheless, as is well understood by those of skill in the art, each individual phosphorothioate of each individual oligonucleotide molecule has a defined stereoconfiguration. In certain embodiments, populations of modified oligonucleotides are enriched for modified oligonucleotides comprising one or more particular phosphorothioate internucleoside linkages in a particular, independently selected stereochemical configuration. In certain embodiments, the particular configuration of the particular phosphorothioate linkage is present in at least 65% of the molecules in the population. In certain embodiments, the particular configuration of the particular phosphorothioate linkage is present in at least 70% of the molecules in the population. In certain embodiments, the particular configuration of the particular phosphorothioate linkage is present in at least 80% of the molecules in the population. In certain embodiments, the particular configuration of the particular phosphorothioate linkage is present in at least 90% of the molecules in the population. In certain embodiments, the particular configuration of the particular phosphorothioate linkage is present in at least 99% of the molecules in the population. Such chirally enriched populations of modified oligonucleotides can be generated using synthetic methods known in the art, e.g., methods described in Oka et al., JACS 125, 8307 (2003), Wan et al. Nuc. Acid. Res. 42, 13456 (2014), and WO 2017/015555. In certain embodiments, a population of modified oligonucleotides is enriched for modified oligonucleotides having at least one indicated phosphorothioate in the (Sp) configuration. In certain embodiments, a population of modified oligonucleotides is enriched for modified oligonucleotides having at least one phosphorothioate in the (Rp) configuration. In certain embodiments, modified oligonucleotides comprising (Rp) and/or (Sp) phosphorothioates comprise one or more of the following formulas, respectively, wherein “B” indicates a nucleobase:

[chemical structure]

Unless otherwise indicated, chiral internucleoside linkages of modified oligonucleotides described herein can be stereorandom or in a particular stereochemical configuration.

[0437] In certain embodiments, compounds targeted to a HSD17B13 nucleic acid comprise one or more modified internucleoside linkages. In certain embodiments, the modified internucleoside linkages are phosphorothioate linkages. In certain embodiments, each internucleoside linkage of an antisense compound is a phosphorothioate internucleoside linkage.

[0438] In certain embodiments, compounds described herein comprise oligonucleotides. Oligonucleotides having modified internucleoside linkages include internucleoside linkages that retain a phosphorus atom as well as internucleoside linkages that do not have a phosphorus atom. Representative phosphorus containing internucleoside linkages include, but are not limited to, phosphodiesters, phosphotriesters, methylphosphonates, phosphoramidate, and phosphorothioates. Methods of preparation of phosphorous-containing and non-phosphorous-containing linkages are well known.

[0439] In certain embodiments, nucleosides of modified oligonucleotides may be linked together using any internucleoside linkage. The two main classes of internucleoside linking groups are defined by the presence or absence of a phosphorus atom. Representative phosphorus-containing internucleoside linkages include, but are not limited to, phosphates, which contain a phosphodiester bond (“P═O”) (also referred to as unmodified or naturally occurring linkages), phosphotriesters, methylphosphonates, phosphoramidates, and phosphorothioates (“P═S”), and phosphorodithioates (“HS—P═S”). Representative non-phosphorus containing internucleoside linking groups include, but are not limited to, methylenemethylimino (—CH₂—N(CH₃)—O—CH₂), thiodiester, thionocarbamate (—O—C(═O)(NH)—S—); siloxane (—O—SiH₂—O—); and N,N′-dimethylhydrazine (—CH₂—N(CH₃)—N(CH₃)—). Modified internucleoside linkages, compared to naturally occurring phosphate linkages, can be used to alter, typically increase, nuclease resistance of the oligonucleotide. In certain embodiments, internucleoside linkages having a chiral atom can be prepared as a racemic mixture, or as separate enantiomers. Representative chiral internucleoside linkages include, but are not limited to, alkylphosphonates and phosphorothioates. Methods of preparation of phosphorous-containing and non-phosphorous-containing internucleoside linkages are well known to those skilled in the art.

[0440] Neutral internucleoside linkages include, without limitation, phosphotriesters, methylphosphonates, MMI (3′-CH₂—N(CH₃)—O-5′), amide-3 (3′-CH₂—C(═O)—N(H)-5′), amide-4 (3′-CH₂—N(H)—C(═O)-5′), formacetal (3′-O—CH₂—O-5′), methoxypropyl, and thioformacetal (3′-S—CH₂—O-5′). Further neutral internucleoside linkages include nonionic linkages comprising siloxane (dialkylsiloxane), carboxylate ester, carboxamide, sulfide, sulfonate ester and amides (See, for example: Carbohydrate Modifications in Antisense Research; Y. S. Sanghvi and P. D. Cook, Eds., ACS Symposium Series 580; Chapters 3 and 4, 40-65). Further neutral internucleoside linkages include nonionic linkages comprising mixed N, O, S and CH₂ component parts.

[0441] In certain embodiments, oligonucleotides comprise modified internucleoside linkages arranged along the oligonucleotide or region thereof in a defined pattern or modified internucleoside linkage motif. In certain embodiments, internucleoside linkages are arranged in a gapped motif. In such embodiments, the internucleoside linkages in each of two wing regions are different from the internucleoside linkages in the gap region. In certain embodiments, the internucleoside linkages in the wings are phosphodiester and the internucleoside linkages in the gap are phosphorothioate. The nucleoside motif is independently selected, so such oligonucleotides having a gapped internucleoside linkage motif may or may not have a gapped nucleoside motif and, if it does have a gapped nucleoside motif, the wing and gap lengths may or may not be the same.

[0442] In certain embodiments, oligonucleotides comprise a region having an alternating internucleoside linkage motif. In certain embodiments, oligonucleotides comprise a region of uniformly modified internucleoside linkages. In certain such embodiments, the oligonucleotide comprises a region that is uniformly linked by phosphorothioate internucleoside linkages. In certain embodiments, the oligonucleotide is uniformly linked by phosphorothioate. In certain embodiments, each internucleoside linkage of the oligonucleotide is selected from phosphodiester and phosphorothioate. In certain embodiments, each internucleoside linkage of the oligonucleotide is selected from phosphodiester and phosphorothioate and at least one internucleoside linkage is phosphorothioate.

[0443] In certain embodiments, the oligonucleotide comprises at least 6 phosphorothioate internucleoside linkages. In certain embodiments, the oligonucleotide comprises at least 8 phosphorothioate internucleoside linkages. In certain embodiments, the oligonucleotide comprises at least 10 phosphorothioate internucleoside linkages. In certain embodiments, the oligonucleotide comprises at least one block of at least 6 consecutive phosphorothioate internucleoside linkages. In certain embodiments, the oligonucleotide comprises at least one block of at least 8 consecutive phosphorothioate internucleoside linkages. In certain embodiments, the oligonucleotide comprises at least one block of at least 10 consecutive phosphorothioate internucleoside linkages. In certain embodiments, the oligonucleotide comprises at least block of at least one 12 consecutive phosphorothioate internucleoside linkages. In certain such embodiments, at least one such block is located at the 3′ end of the oligonucleotide. In certain such embodiments, at least one such block is located within 3 nucleosides of the 3′ end of the oligonucleotide.

[0444] In certain embodiments, oligonucleotides comprise one or more methylphosphonate linkages. In certain embodiments, oligonucleotides having a gapmer nucleoside motif comprise a linkage motif comprising all phosphorothioate linkages except for one or two methylphosphonate linkages. In certain embodiments, one methylphosphonate linkage is in the central gap of an oligonucleotide having a gapmer nucleoside motif.

[0445] In certain embodiments, it is desirable to arrange the number of phosphorothioate internucleoside linkages and phosphodiester internucleoside linkages to maintain nuclease resistance. In certain embodiments, it is desirable to arrange the number and position of phosphorothioate internucleoside linkages and the number and position of phosphodiester internucleoside linkages to maintain nuclease resistance. In certain embodiments, the number of phosphorothioate internucleoside linkages may be decreased and the number of phosphodiester internucleoside linkages may be increased. In certain embodiments, the number of phosphorothioate internucleoside linkages may be decreased and the number of phosphodiester internucleoside linkages may be increased while still maintaining nuclease resistance. In certain embodiments, it is desirable to decrease the number of phosphorothioate internucleoside linkages while retaining nuclease resistance. In certain embodiments, it is desirable to increase the number of phosphodiester internucleoside linkages while retaining nuclease resistance.

[0446] 3. Certain Motifs

[0447] In certain embodiments, compounds described herein comprise oligonucleotides. Oligonucleotides can have a motif, e.g. a pattern of unmodified and/or modified sugar moieties, nucleobases, and/or internucleoside linkages. In certain embodiments, modified oligonucleotides comprise one or more modified nucleosides comprising a modified sugar. In certain embodiments, modified oligonucleotides comprise one or more modified nucleosides comprising a modified nucleobase. In certain embodiments, modified oligonucleotides comprise one or more modified internucleoside linkage. In such embodiments, the modified, unmodified, and differently modified sugar moieties, nucleobases, and/or internucleoside linkages of a modified oligonucleotide define a pattern or motif. In certain embodiments, the patterns of sugar moieties, nucleobases, and internucleoside linkages are each independent of one another. Thus, a modified oligonucleotide may be described by its sugar motif, nucleobase motif and/or internucleoside linkage motif (as used herein, nucleobase motif describes the modifications to the nucleobases independent of the sequence of nucleobases).

[0448] a. Certain Sugar Motifs

[0449] In certain embodiments, compounds described herein comprise oligonucleotides. In certain embodiments, oligonucleotides comprise one or more type of modified sugar and/or unmodified sugar moiety arranged along the oligonucleotide or region thereof in a defined pattern or sugar motif. In certain instances, such sugar motifs include, but are not limited to, any of the sugar modifications discussed herein.

[0450] In certain embodiments, modified oligonucleotides comprise or consist of a region having a gapmer motif, which comprises two external regions or “wings” and a central or internal region or “gap”. The three regions of a gapmer motif (the 5′-wing, the gap, and the 3′-wing) form a contiguous sequence of nucleosides, wherein at least some of the sugar moieties of the nucleosides of each of the wings differ from at least some of the sugar moieties of the nucleosides of the gap. Specifically, at least the sugar moieties of the nucleosides of each wing that are closest to the gap (the 3′-most nucleoside of the 5′-wing and the 5′-most nucleoside of the 3′-wing) differ from the sugar moiety of the neighboring gap nucleosides, thus defining the boundary between the wings and the gap (i.e., the wing/gap junction). In certain embodiments, the sugar moieties within the gap are the same as one another. In certain embodiments, the gap includes one or more nucleosides having a sugar moiety that differs from the sugar moiety of one or more other nucleosides of the gap. In certain embodiments, the sugar motifs of the two wings are the same as one another (symmetric gapmer). In certain embodiments, the sugar motif of the 5′-wing differs from the sugar motif of the 3′-wing (asymmetric gapmer).

[0451] In certain embodiments, the wings of a gapmer comprise 1-5 nucleosides. In certain embodiments, the wings of a gapmer comprise 2-5 nucleosides. In certain embodiments, the wings of a gapmer comprise 3-5 nucleosides. In certain embodiments, the nucleosides of a gapmer are all modified nucleosides.

[0452] In certain embodiments, the gap of a gapmer comprises 7-12 nucleosides. In certain embodiments, the gap of a gapmer comprises 7-10 nucleosides. In certain embodiments, the gap of a gapmer comprises 8-10 nucleosides. In certain embodiments, the gap of a gapmer comprises 10 nucleosides. In certain embodiments, each nucleoside of the gap of a gapmer is an unmodified 2′-deoxy nucleoside.

[0453] In certain embodiments, the gapmer is a deoxy gapmer. In such embodiments, the nucleosides on the gap side of each wing/gap junction are unmodified 2′-deoxy nucleosides and the nucleosides on the wing sides of each wing/gap junction are modified nucleosides. In certain such embodiments, each nucleoside of the gap is an unmodified 2′-deoxy nucleoside. In certain such embodiments, each nucleoside of each wing is a modified nucleoside.

[0454] In certain embodiments, a modified oligonucleotide has a fully modified sugar motif wherein each nucleoside of the modified oligonucleotide comprises a modified sugar moiety. In certain embodiments, modified oligonucleotides comprise or consist of a region having a fully modified sugar motif wherein each nucleoside of the region comprises a modified sugar moiety. In certain embodiments, modified oligonucleotides comprise or consist of a region having a fully modified sugar motif, wherein each nucleoside within the fully modified region comprises the same modified sugar moiety, referred to herein as a uniformly modified sugar motif. In certain embodiments, a fully modified oligonucleotide is a uniformly modified oligonucleotide. In certain embodiments, each nucleoside of a uniformly modified comprises the same 2′-modification.

[0455] b. Certain Nucleobase Motifs

[0456] In certain embodiments, compounds described herein comprise oligonucleotides. In certain embodiments, oligonucleotides comprise modified and/or unmodified nucleobases arranged along the oligonucleotide or region thereof in a defined pattern or motif. In certain embodiments, each nucleobase is modified. In certain embodiments, none of the nucleobases are modified. In certain embodiments, each purine or each pyrimidine is modified. In certain embodiments, each adenine is modified. In certain embodiments, each guanine is modified. In certain embodiments, each thymine is modified. In certain embodiments, each uracil is modified. In certain embodiments, each cytosine is modified. In certain embodiments, some or all of the cytosine nucleobases in a modified oligonucleotide are 5-methylcytosines.

[0457] In certain embodiments, modified oligonucleotides comprise a block of modified nucleobases. In certain such embodiments, the block is at the 3′-end of the oligonucleotide. In certain embodiments, the block is within 3 nucleosides of the 3′-end of the oligonucleotide. In certain embodiments, the block is at the 5′-end of the oligonucleotide. In certain embodiments, the block is within 3 nucleosides of the 5′-end of the oligonucleotide.

[0458] In certain embodiments, oligonucleotides having a gapmer motif comprise a nucleoside comprising a modified nucleobase. In certain such embodiments, one nucleoside comprising a modified nucleobase is in the central gap of an oligonucleotide having a gapmer motif. In certain such embodiments, the sugar moiety of said nucleoside is a 2′-deoxyribosyl moiety. In certain embodiments, the modified nucleobase is selected from: a 2-thiopyrimidine and a 5-propynepyrimidine.

[0459] c. Certain Internucleoside Linkage Motifs

[0460] In certain embodiments, compounds described herein comprise oligonucleotides. In certain embodiments, oligonucleotides comprise modified and/or unmodified internucleoside linkages arranged along the oligonucleotide or region thereof in a defined pattern or motif. In certain embodiments, essentially each internucleoside linking group is a phosphate internucleoside linkage (P═O). In certain embodiments, each internucleoside linking group of a modified oligonucleotide is a phosphorothioate (P═S). In certain embodiments, each internucleoside linking group of a modified oligonucleotide is independently selected from a phosphorothioate and phosphate internucleoside linkage. In certain embodiments, the sugar motif of a modified oligonucleotide is a gapmer and the internucleoside linkages within the gap are all modified. In certain such embodiments, some or all of the internucleoside linkages in the wings are unmodified phosphate linkages. In certain embodiments, the terminal internucleoside linkages are modified. In certain embodiments, the sugar motif of a modified oligonucleotide is a gapmer, and the internucleoside linkage motif comprises at least one phosphodiester internucleoside linkage in at least one wing, wherein the at least one phosphodiester linkage is not a terminal internucleoside linkage, and the remaining internucleoside linkages are phosphorothioate internucleoside linkages. In certain such embodiments, all of the phosphorothioate linkages are stereorandom. In certain embodiments, all of the phosphorothioate linkages in the wings are (Sp) phosphorothioates, and the gap comprises at least one Sp, Sp, Rp motif. In certain embodiments, populations of modified oligonucleotides are enriched for modified oligonucleotides comprising such internucleoside linkage motifs.

[0461] 4. Certain Modified Oligonucleotides

[0462] In certain embodiments, compounds described herein comprise modified oligonucleotides. In certain embodiments, the above modifications (sugar, nucleobase, internucleoside linkage) are incorporated into a modified oligonucleotide. In certain embodiments, modified oligonucleotides are characterized by their modification, motifs, and overall lengths. In certain embodiments, such parameters are each independent of one another. Thus, unless otherwise indicated, each internucleoside linkage of an oligonucleotide having a gapmer sugar motif may be modified or unmodified and may or may not follow the gapmer modification pattern of the sugar modifications. For example, the internucleoside linkages within the wing regions of a sugar gapmer may be the same or different from one another and may be the same or different from the internucleoside linkages of the gap region of the sugar motif. Likewise, such gapmer oligonucleotides may comprise one or more modified nucleobases independent of the gapmer pattern of the sugar modifications. Furthermore, in certain instances, an oligonucleotide is described by an overall length or range and by lengths or length ranges of two or more regions (e.g., a regions of nucleosides having specified sugar modifications). In such circumstances, it may be possible to select numbers for each range that result in an oligonucleotide having an overall length falling outside the specified range. In such circumstances, both elements must be satisfied. For example, in certain embodiments, a modified oligonucleotide consists of 15-20 linked nucleosides and has a sugar motif consisting of three regions, A, B, and C, wherein region A consists of 2-6 linked nucleosides having a specified sugar motif, region B consists of 6-10 linked nucleosides having a specified sugar motif, and region C consists of 2-6 linked nucleosides having a specified sugar motif. Such embodiments do not include modified oligonucleotides where A and C each consist of 6 linked nucleosides and B consists of 10 linked nucleosides (even though those numbers of nucleosides are permitted within the requirements for A, B, and C) because the overall length of such oligonucleotide will be 22, which exceeds the upper limit of the overall length of the modified oligonucleotide (20). Herein, if a description of an oligonucleotide is silent with respect to one or more parameters, such parameter is not limited. Thus, a modified oligonucleotide described only as having a gapmer sugar motif without further description may have any length, internucleoside linkage motif, and nucleobase motif. Unless otherwise indicated, all modifications are independent of nucleobase sequence.

### Certain Conjugated Compounds

[0463] In certain embodiments, the compounds described herein comprise or consist of an oligonucleotide (modified or unmodified) and, optionally, one or more conjugate groups and/or terminal groups. Conjugate groups consist of one or more conjugate moiety and a conjugate linker which links the conjugate moiety to the oligonucleotide. Conjugate groups may be attached to either or both ends of an oligonucleotide and/or at any internal position. In certain embodiments, conjugate groups are attached to the 2′-position of a nucleoside of a modified oligonucleotide. In certain embodiments, conjugate groups that are attached to either or both ends of an oligonucleotide are terminal groups. In certain such embodiments, conjugate groups or terminal groups are attached at the 3′ and/or 5′-end of oligonucleotides. In certain such embodiments, conjugate groups (or terminal groups) are attached at the 3′-end of oligonucleotides. In certain embodiments, conjugate groups are attached near the 3′-end of oligonucleotides. In certain embodiments, conjugate groups (or terminal groups) are attached at the 5′-end of oligonucleotides. In certain embodiments, conjugate groups are attached near the 5′-end of oligonucleotides.

[0464] In certain embodiments, the oligonucleotide is modified. In certain embodiments, the oligonucleotide of a compound has a nucleobase sequence that is complementary to a target nucleic acid. In certain embodiments, oligonucleotides are complementary to a messenger RNA (mRNA). In certain embodiments, oligonucleotides are complementary to a pre-mRNA. In certain embodiments, oligonucleotides are complementary to a sense transcript.

[0465] Examples of terminal groups include but are not limited to conjugate groups, capping groups, phosphate moieties, protecting groups, modified or unmodified nucleosides, and two or more nucleosides that are independently modified or unmodified.

[0466] In certain embodiments, oligonucleotides are covalently attached to one or more conjugate groups. In certain embodiments, conjugate groups modify one or more properties of the attached oligonucleotide, including but not limited to pharmacodynamics, pharmacokinetics, stability, binding, absorption, tissue distribution, cellular distribution, cellular uptake, charge and clearance. In certain embodiments, conjugate groups impart a new property on the attached oligonucleotide, e.g., fluorophores or reporter groups that enable detection of the oligonucleotide. Certain conjugate groups and conjugate moieties have been described previously, for example: cholesterol moiety (Letsinger et al., Proc. Natl. Acad. Sci. USA, 1989, 86, 6553-6556), cholic acid (Manoharan et al., Bioorg. Med. Chem. Lett., 1994, 4, 1053-1060), a thioether, e.g., hexyl-S-tritylthiol (Manoharan et al., Ann. N.Y. Acad. Sci., 1992, 660, 306-309; Manoharan et al., Bioorg. Med. Chem. Lett., 1993, 3, 2765-2770), a thiocholesterol (Oberhauser et al., Nucl. Acids Res., 1992, 20, 533-538), an aliphatic chain, e.g., do-decan-diol or undecyl residues (Saison-Behmoaras et al., EMBO J., 1991, 10, 1111-1118; Kabanov et al., FEBS Lett., 1990, 259, 327-330; Svinarchuk et al., Biochimie, 1993, 75, 49-54), a phospholipid, e.g., di-hexadecyl-rac-glycerol or triethyl-ammonium 1,2-di-O-hexadecyl-rac-glycero-3-H-phosphonate (Manoharan et al., Tetrahedron Lett., 1995, 36, 3651-3654; Shea et al., Nucl. Acids Res., 1990, 18, 3777-3783), a polyamine or a polyethylene glycol chain (Manoharan et al., Nucleosides & Nucleotides, 1995, 14, 969-973), or adamantane acetic acid a palmityl moiety (Mishra et al., Biochim. Biophys. Acta, 1995, 1264, 229-237), an octadecylamine or hexylamino-carbonyl-oxycholesterol moiety (Crooke et al., J. Pharmacol. Exp. Ther., 1996, 277, 923-937), a tocopherol group (Nishina et al., Molecular Therapy Nucleic Acids, 2015, 4, e220; and Nishina et al., Molecular Therapy, 2008, 16, 734-740), or a GalNAc cluster (e.g., WO2014/179620).

[0467] 1. Conjugate Moieties

[0468] Conjugate moieties include, without limitation, intercalators, reporter molecules, polyamines, polyamides, peptides, carbohydrates (e.g., GalNAc), vitamin moieties, polyethylene glycols, thioethers, polyethers, cholesterols, thiocholesterols, cholic acid moieties, folate, lipids, phospholipids, biotin, phenazine, phenanthridine, anthraquinone, adamantane, acridine, fluoresceins, rhodamines, coumarins, fluorophores, and dyes.

[0469] In certain embodiments, a conjugate moiety comprises an active drug substance, for example, aspirin, warfarin, phenylbutazone, ibuprofen, suprofen, fen-bufen, ketoprofen, (S)-(+)-pranoprofen, carprofen, dansylsarcosine, 2,3,5-triiodobenzoic acid, fingolimod, flufenamic acid, folinic acid, a benzothiadiazide, chlorothiazide, a diazepine, indo-methicin, a barbiturate, a cephalosporin, a sulfa drug, an antidiabetic, an antibacterial or an antibiotic.

[0470] 2. Conjugate Linkers

[0471] Conjugate moieties are attached to oligonucleotides through conjugate linkers. In certain compounds, the conjugate linker is a single chemical bond (i.e., the conjugate moiety is attached directly to an oligonucleotide through a single bond). In certain compounds, a conjugate moiety is attached to an oligonucleotide via a more complex conjugate linker comprising one or more conjugate linker moieities, which are sub-units making up a conjugate linker. In certain embodiments, the conjugate linker comprises a chain structure, such as a hydrocarbyl chain, or an oligomer of repeating units such as ethylene glycol, nucleosides, or amino acid units.

[0472] In certain embodiments, a conjugate linker comprises one or more groups selected from alkyl, amino, oxo, amide, disulfide, polyethylene glycol, ether, thioether, and hydroxylamino. In certain such embodiments, the conjugate linker comprises groups selected from alkyl, amino, oxo, amide and ether groups. In certain embodiments, the conjugate linker comprises groups selected from alkyl and amide groups. In certain embodiments, the conjugate linker comprises groups selected from alkyl and ether groups. In certain embodiments, the conjugate linker comprises at least one phosphorus moiety. In certain embodiments, the conjugate linker comprises at least one phosphate group. In certain embodiments, the conjugate linker includes at least one neutral linking group.

[0473] In certain embodiments, conjugate linkers, including the conjugate linkers described above, are bifunctional linking moieties, e.g., those known in the art to be useful for attaching conjugate groups to parent compounds, such as the oligonucleotides provided herein. In general, a bifunctional linking moiety comprises at least two functional groups. One of the functional groups is selected to bind to a particular site on a parent compound and the other is selected to bind to a conjugate group. Examples of functional groups used in a bifunctional linking moiety include but are not limited to electrophiles for reacting with nucleophilic groups and nucleophiles for reacting with electrophilic groups. In certain embodiments, bifunctional linking moieties comprise one or more groups selected from amino, hydroxyl, carboxylic acid, thiol, alkyl, alkenyl, and alkynyl.

[0474] Examples of conjugate linkers include but are not limited to pyrrolidine, 8-amino-3,6-dioxaoctanoic acid (ADO), succinimidyl 4-(N-maleimidomethyl) cyclohexane-1-carboxylate (SMCC) and 6-aminohexanoic acid (AHEX or AHA). Other conjugate linkers include but are not limited to substituted or unsubstituted C₁-C₁₀ alkyl, substituted or unsubstituted C₂-C₁₀ alkenyl or substituted or unsubstituted C₂-C₁₀ alkynyl, wherein a nonlimiting list of preferred substituent groups includes hydroxyl, amino, alkoxy, carboxy, benzyl, phenyl, nitro, thiol, thioalkoxy, halogen, alkyl, aryl, alkenyl and alkynyl.

[0475] In certain embodiments, conjugate linkers comprise 1-10 linker-nucleosides. In certain embodiments, such linker-nucleosides are modified nucleosides. In certain embodiments such linker-nucleosides comprise a modified sugar moiety. In certain embodiments, linker-nucleosides are unmodified. In certain embodiments, linker-nucleosides comprise an optionally protected heterocyclic base selected from a purine, substituted purine, pyrimidine or substituted pyrimidine. In certain embodiments, a cleavable moiety is a nucleoside selected from uracil, thymine, cytosine, 4-N-benzoylcytosine, 5-methylcytosine, 4-N-benzoyl-5-methylcytosine, adenine, 6-N-benzoyladenine, guanine and 2-N-isobutyrylguanine. It is typically desirable for linker-nucleosides to be cleaved from the compound after it reaches a target tissue. Accordingly, linker-nucleosides are typically linked to one another and to the remainder of the compound through cleavable bonds. In certain embodiments, such cleavable bonds are phosphodiester bonds.

[0476] Herein, linker-nucleosides are not considered to be part of the oligonucleotide. Accordingly, in embodiments in which an compound comprises an oligonucleotide consisting of a specified number or range of linked nucleosides and/or a specified percent complementarity to a reference nucleic acid and the compound also comprises a conjugate group comprising a conjugate linker comprising linker-nucleosides, those linker-nucleosides are not counted toward the length of the oligonucleotide and are not used in determining the percent complementarity of the oligonucleotide for the reference nucleic acid. For example, a compound may comprise (1) a modified oligonucleotide consisting of 8-30 nucleosides and (2) a conjugate group comprising 1-10 linker-nucleosides that are contiguous with the nucleosides of the modified oligonucleotide. The total number of contiguous linked nucleosides in such a compound is more than 30. Alternatively, a compound may comprise a modified oligonucleotide consisting of 8-30 nucleosides and no conjugate group. The total number of contiguous linked nucleosides in such a compound is no more than 30. Unless otherwise indicated conjugate linkers comprise no more than 10 linker-nucleosides. In certain embodiments, conjugate linkers comprise no more than 5 linker-nucleosides. In certain embodiments, conjugate linkers comprise no more than 3 linker-nucleosides. In certain embodiments, conjugate linkers comprise no more than 2 linker-nucleosides. In certain embodiments, conjugate linkers comprise no more than 1 linker-nucleoside.

[0477] In certain embodiments, it is desirable for a conjugate group to be cleaved from the oligonucleotide. For example, in certain circumstances compounds comprising a particular conjugate moiety are better taken up by a particular cell type, but once the compound has been taken up, it is desirable that the conjugate group be cleaved to release the unconjugated or parent oligonucleotide. Thus, certain conjugate linkers may comprise one or more cleavable moieties. In certain embodiments, a cleavable moiety is a cleavable bond. In certain embodiments, a cleavable moiety is a group of atoms comprising at least one cleavable bond. In certain embodiments, a cleavable moiety comprises a group of atoms having one, two, three, four, or more than four cleavable bonds. In certain embodiments, a cleavable moiety is selectively cleaved inside a cell or subcellular compartment, such as a lysosome. In certain embodiments, a cleavable moiety is selectively cleaved by endogenous enzymes, such as nucleases.

[0478] In certain embodiments, a cleavable bond is selected from among: an amide, an ester, an ether, one or both esters of a phosphodiester, a phosphate ester, a carbamate, or a disulfide. In certain embodiments, a cleavable bond is one or both of the esters of a phosphodiester. In certain embodiments, a cleavable moiety comprises a phosphate or phosphodiester. In certain embodiments, the cleavable moiety is a phosphate linkage between an oligonucleotide and a conjugate moiety or conjugate group.

[0479] In certain embodiments, a cleavable moiety comprises or consists of one or more linker-nucleosides. In certain such embodiments, the one or more linker-nucleosides are linked to one another and/or to the remainder of the compound through cleavable bonds. In certain embodiments, such cleavable bonds are unmodified phosphodiester bonds. In certain embodiments, a cleavable moiety is 2′-deoxy nucleoside that is attached to either the 3′ or 5′-terminal nucleoside of an oligonucleotide by a phosphate internucleoside linkage and covalently attached to the remainder of the conjugate linker or conjugate moiety by a phosphate or phosphorothioate linkage. In certain such embodiments, the cleavable moiety is 2′-deoxyadenosine.

[0480] 3. Certain Cell-Targeting Conjugate Moietiess

[0481] In certain embodiments, a conjugate group comprises a cell-targeting conjugate moiety. In certain embodiments, a conjugate group has the general formula:

[chemical structure]

[0482] wherein n is from 1 to about 3, m is 0 when n is 1, m is 1 when n is 2 or greater, j is 1 or 0, and k is 1 or 0.

[0483] In certain embodiments, n is 1, j is 1 and k is 0. In certain embodiments, n is 1, j is 0 and k is 1. In certain embodiments, n is 1, j is 1 and k is 1. In certain embodiments, n is 2, j is 1 and k is 0. In certain embodiments, n is 2, j is 0 and k is 1. In certain embodiments, n is 2, j is 1 and k is 1. In certain embodiments, n is 3, j is 1 and k is 0. In certain embodiments, n is 3, j is 0 and k is 1. In certain embodiments, n is 3, j is 1 and k is 1.

[0484] In certain embodiments, conjugate groups comprise cell-targeting moieties that have at least one tethered ligand. In certain embodiments, cell-targeting moieties comprise two tethered ligands covalently attached to a branching group. In certain embodiments, cell-targeting moieties comprise three tethered ligands covalently attached to a branching group.

[0485] In certain embodiments, the cell-targeting moiety comprises a branching group comprising one or more groups selected from alkyl, amino, oxo, amide, disulfide, polyethylene glycol, ether, thioether and hydroxylamino groups. In certain embodiments, the branching group comprises a branched aliphatic group comprising groups selected from alkyl, amino, oxo, amide, disulfide, polyethylene glycol, ether, thioether and hydroxylamino groups. In certain such embodiments, the branched aliphatic group comprises groups selected from alkyl, amino, oxo, amide and ether groups. In certain such embodiments, the branched aliphatic group comprises groups selected from alkyl, amino and ether groups. In certain such embodiments, the branched aliphatic group comprises groups selected from alkyl and ether groups. In certain embodiments, the branching group comprises a mono or polycyclic ring system.

[0486] In certain embodiments, each tether of a cell-targeting moiety comprises one or more groups selected from alkyl, substituted alkyl, ether, thioether, disulfide, amino, oxo, amide, phosphodiester, and polyethylene glycol, in any combination. In certain embodiments, each tether is a linear aliphatic group comprising one or more groups selected from alkyl, ether, thioether, disulfide, amino, oxo, amide, and polyethylene glycol, in any combination. In certain embodiments, each tether is a linear aliphatic group comprising one or more groups selected from alkyl, phosphodiester, ether, amino, oxo, and amide, in any combination. In certain embodiments, each tether is a linear aliphatic group comprising one or more groups selected from alkyl, ether, amino, oxo, and amid, in any combination. In certain embodiments, each tether is a linear aliphatic group comprising one or more groups selected from alkyl, amino, and oxo, in any combination. In certain embodiments, each tether is a linear aliphatic group comprising one or more groups selected from alkyl and oxo, in any combination. In certain embodiments, each tether is a linear aliphatic group comprising one or more groups selected from alkyl and phosphodiester, in any combination. In certain embodiments, each tether comprises at least one phosphorus linking group or neutral linking group. In certain embodiments, each tether comprises a chain from about 6 to about 20 atoms in length. In certain embodiments, each tether comprises a chain from about 10 to about 18 atoms in length. In certain embodiments, each tether comprises about 10 atoms in chain length.

[0487] In certain embodiments, each ligand of a cell-targeting moiety has an affinity for at least one type of receptor on a target cell. In certain embodiments, each ligand has an affinity for at least one type of receptor on the surface of a mammalian liver cell. In certain embodiments, each ligand has an affinity for the hepatic asialoglycoprotein receptor (ASGP-R). In certain embodiments, each ligand is a carbohydrate. In certain embodiments, each ligand is, independently selected from galactose, N-acetyl galactoseamine (GalNAc), mannose, glucose, glucoseamine and fucose. In certain embodiments, each ligand is N-acetyl galactoseamine (GalNAc). In certain embodiments, the cell-targeting moiety comprises 3 GalNAc ligands. In certain embodiments, the cell-targeting moiety comprises 2 GalNAc ligands. In certain embodiments, the cell-targeting moiety comprises 1 GalNAc ligand.

[0488] In certain embodiments, each ligand of a cell-targeting moiety is a carbohydrate, carbohydrate derivative, modified carbohydrate, polysaccharide, modified polysaccharide, or polysaccharide derivative. In certain such embodiments, the conjugate group comprises a carbohydrate cluster (see, e.g., Maier et al., “Synthesis of Antisense Oligonucleotides Conjugated to a Multivalent Carbohydrate Cluster for Cellular Targeting,” Bioconjugate Chemistry, 2003, 14, 18-29 or Rensen et al., “Design and Synthesis of Novel N-Acetylgalactosamine-Terminated Glycolipids for Targeting of Lipoproteins to the Hepatic Asiaglycoprotein Receptor,” J. Med. Chem. 2004, 47, 5798-5808). In certain such embodiments, each ligand is an amino sugar or a thio sugar. For example, amino sugars may be selected from any number of compounds known in the art, such as sialic acid, α-D-galactosamine, β-muramic acid, 2-deoxy-2-methylamino-L-glucopyranose, 4,6-dideoxy-4-formamido-2,3-di-O-methyl-D-mannopyranose, 2-deoxy-2-sulfoamino-D-glucopyranose and N-sulfo-D-glucosamine, and N-glycoloyl-α-neuraminic acid. For example, thio sugars may be selected from 5-Thio-β-D-glucopyranose, methyl 2,3,4-tri-O-acetyl-1-thio-6-O-trityl-α-D-glucopyranoside, galactopyranose, and ethyl 3,4,6,7-tetra-O-acetyl-2-deoxy-1,5-dithio-α-D-gLuco-heptopyranoside.

[0489] In certain embodiments, conjugate groups comprise a cell-targeting moiety having the formula:

[chemical structure]

[0490] In certain embodiments, conjugate groups comprise a cell-targeting moiety having the formula:

[chemical structure]

[0491] In certain embodiments, conjugate groups comprise a cell-targeting moiety having the formula:

[chemical structure]

[0492] In certain embodiments, conjugate groups comprise a cell-targeting moiety having the formula:

[chemical structure]

[0493] In certain embodiments, conjugate groups comprise a cell-targeting moiety having the formula:

[chemical structure]

[0494] In certain embodiments, compounds comprise a conjugate group described herein as “LICA-1”. LICA-1 has the formula:

[chemical structure]

[0495] In certain embodiments, compounds described herein comprise LICA-1 and a cleavable moiety within the conjugate linker have the formula:

[chemical structure]

[0496] wherein oligo is an oligonucleotide.

[0497] Representative United States patents, United States patent application publications, international patent application publications, and other publications that teach the preparation of certain of the above noted conjugate groups, compounds comprising conjugate groups, tethers, conjugate linkers, branching groups, ligands, cleavable moieties as well as other modifications include without limitation, U.S. Pat. Nos. 5,994,517, 6,300,319, 6,660,720, 6,906,182, 7,262,177, 7,491,805, 8,106,022, 7,723,509, US 2006/0148740, US 2011/0123520, WO 2013/033230 and WO 2012/037254, Biessen et al., J. Med. Chem. 1995, 38, 1846-1852, Lee et al., Bioorganic & Medicinal Chemistry 2011, 19, 2494-2500, Rensen et al., J. Biol. Chem. 2001, 276, 37577-37584, Rensen et al., J. Med. Chem. 2004, 47, 5798-5808, Sliedregt et al., J. Med. Chem. 1999, 42, 609-618, and Valentijn et al., Tetrahedron, 1997, 53, 759-770.

[0498] In certain embodiments, modified oligonucleotides comprise a gapmer or fully modified sugar motif and a conjugate group comprising at least one, two, or three GalNAc ligands. In certain embodiments, compounds comprise a conjugate group found in any of the following references: Lee, Carbohydr Res, 1978, 67, 509-514; Connolly et al., J Biol Chem, 1982, 257, 939-945; Pavia et al., Int J Pep Protein Res, 1983, 22, 539-548; Lee et al., Biochem, 1984, 23, 4255-4261; Lee et al., Glycoconjugate J, 1987, 4, 317-328; Toyokuni et al., Tetrahedron Lett, 1990, 31, 2673-2676; Biessen et al., J Med Chem, 1995, 38, 1538-1546; Valentijn et al., Tetrahedron, 1997, 53, 759-770; Kim et al., Tetrahedron Lett, 1997, 38, 3487-3490; Lee et al., Bioconjug Chem, 1997, 8, 762-765; Kato et al., Glycobiol, 2001, 11, 821-829; Rensen et al., J Biol Chem, 2001, 276, 37577-37584; Lee et al., Methods Enzymol, 2003, 362, 38-43; Westerlind et al., Glycoconj J, 2004, 21, 227-241; Lee et al., Bioorg Med Chem Lett, 2006, 16(19), 5132-5135; Maierhofer et al., Bioorg Med Chem, 2007, 15, 7661-7676; Khorev et al., Bioorg Med Chem, 2008, 16, 5216-5231; Lee et al., Bioorg Med Chem, 2011, 19, 2494-2500; Kornilova et al., Analyt Biochem, 2012, 425, 43-46; Pujol et al., Angew Chemie Int Ed Engl, 2012, 51, 7445-7448; Biessen et al., J Med Chem, 1995, 38, 1846-1852; Sliedregt et al., J Med Chem, 1999, 42, 609-618; Rensen et al., J Med Chem, 2004, 47, 5798-5808; Rensen et al., Arterioscler Thromb Vasc Biol, 2006, 26, 169-175; van Rossenberg et al., Gene Ther, 2004, 11, 457-464; Sato et al., J Am Chem Soc, 2004, 126, 14013-14022; Lee et al., J Org Chem, 2012, 77, 7564-7571; Biessen et al., FASEB J, 2000, 14, 1784-1792; Rajur et al., Bioconjug Chem, 1997, 8, 935-940; Duff et al., Methods Enzymol, 2000, 313, 297-321; Maier et al., Bioconjug Chem, 2003, 14, 18-29; Jayaprakash et al., Org Lett, 2010, 12, 5410-5413; Manoharan, Antisense Nucleic Acid Drug Dev, 2002, 12, 103-128; Merwin et al., Bioconjug Chem, 1994, 5, 612-620; Tomiya et al., Bioorg Med Chem, 2013, 21, 5275-5281; International applications WO1998/013381; WO2011/038356; WO1997/046098; WO2008/098788; WO2004/101619; WO2012/037254; WO2011/120053; WO2011/100131; WO2011/163121; WO2012/177947; WO2013/033230; WO2013/075035; WO2012/083185; WO2012/083046; WO2009/082607; WO2009/134487; WO2010/144740; WO2010/148013; WO1997/020563; WO2010/088537; WO2002/043771; WO2010/129709; WO2012/068187; WO2009/126933; WO2004/024757; WO2010/054406; WO2012/089352; WO2012/089602; WO2013/166121; WO2013/165816; U.S. Pat. Nos. 4,751,219; 8,552,163; 6,908,903; 7,262,177; 5,994,517; 6,300,319; 8,106,022; 7,491,805; 7,491,805; 7,582,744; 8,137,695; 6,383,812; 6,525,031; 6,660,720; 7,723,509; 8,541,548; 8,344,125; 8,313,772; 8,349,308; 8,450,467; 8,501,930; 8,158,601; 7,262,177; 6,906,182; 6,620,916; 8,435,491; 8,404,862; 7,851,615; Published U.S. Patent Application Publications US2011/0097264; US2011/0097265; US2013/0004427; US2005/0164235; US2006/0148740; US2008/0281044; U52010/0240730; U52003/0119724; US2006/0183886; US2008/0206869; U52011/0269814; US2009/0286973; US2011/0207799; US2012/0136042; US2012/0165393; US2008/0281041; US2009/0203135; US2012/0035115; US2012/0095075; US2012/0101148; US2012/0128760; US2012/0157509; US2012/0230938; US2013/0109817; US2013/0121954; US2013/0178512; US2013/0236968; US2011/0123520; US2003/0077829; US2008/0108801; and US2009/0203132.

[0499] In certain embodiments, compounds are single-stranded. In certain embodiments, compounds are double-stranded.

### Compositions and Methods for Formulating Pharmaceutical Compositions

[0500] Compounds described herein may be admixed with pharmaceutically acceptable active or inert substances for the preparation of pharmaceutical compositions or formulations. Compositions and methods for the formulation of pharmaceutical compositions are dependent upon a number of criteria, including, but not limited to, route of administration, extent of disease, or dose to be administered.

[0501] Certain embodiments provide pharmaceutical compositions comprising one or more compounds or a salt thereof. In certain embodiments, the compounds are antisense compounds or oligomeric compounds. In certain embodiments, the compounds comprise or consist of a modified oligonucleotide. In certain such embodiments, the pharmaceutical composition comprises a suitable pharmaceutically acceptable diluent or carrier. In certain embodiments, a pharmaceutical composition comprises a sterile saline solution and one or more compound. In certain embodiments, such pharmaceutical composition consists of a sterile saline solution and one or more compound. In certain embodiments, the sterile saline is pharmaceutical grade saline. In certain embodiments, a pharmaceutical composition comprises one or more compound and sterile water. In certain embodiments, a pharmaceutical composition consists of one compound and sterile water. In certain embodiments, the sterile water is pharmaceutical grade water. In certain embodiments, a pharmaceutical composition comprises one or more compounds and phosphate-buffered saline (PBS). In certain embodiments, a pharmaceutical composition consists of one or more compound and sterile PBS. In certain embodiments, the sterile PBS is pharmaceutical grade PBS. Compositions and methods for the formulation of pharmaceutical compositions are dependent upon a number of criteria, including, but not limited to, route of administration, extent of disease, or dose to be administered.

[0502] A compound described herein targeted to HSD17B13 nucleic acid can be utilized in pharmaceutical compositions by combining the compound with a suitable pharmaceutically acceptable diluent or carrier. In certain embodiments, a pharmaceutically acceptable diluent is water, such as sterile water suitable for injection. Accordingly, in one embodiment, employed in the methods described herein is a pharmaceutical composition comprising a compound targeted to HSD17B13 nucleic acid and a pharmaceutically acceptable diluent. In certain embodiments, the pharmaceutically acceptable diluent is water. In certain embodiments, the compound comprises or consists of a modified oligonucleotide provided herein.

[0503] Pharmaceutical compositions comprising compounds provided herein encompass any pharmaceutically acceptable salts, esters, or salts of such esters, or any other oligonucleotide which, upon administration to an animal, including a human, is capable of providing (directly or indirectly) the biologically active metabolite or residue thereof. In certain embodiments, the compounds are antisense compounds or oligomeric compounds. In certain embodiments, the compound comprises or consists of a modified oligonucleotide. Accordingly, for example, the disclosure is also drawn to pharmaceutically acceptable salts of compounds, prodrugs, pharmaceutically acceptable salts of such prodrugs, and other bioequivalents. Suitable pharmaceutically acceptable salts include, but are not limited to, sodium and potassium salts.

[0504] A prodrug can include the incorporation of additional nucleosides at one or both ends of a compound which are cleaved by endogenous nucleases within the body, to form the active compound.

[0505] In certain embodiments, the compounds or compositions further comprise a pharmaceutically acceptable carrier or diluent.

### Examples

[0506] The Examples below describe the screening process to identify compounds targeted to HSD17B13.

### Non-Limiting Disclosure and Incorporation by Reference

[0507] Although the sequence listing accompanying this filing identifies each sequence as either “RNA” or “DNA” as required, in reality, those sequences may be modified with any combination of chemical modifications. One of skill in the art will readily appreciate that such designation as “RNA” or “DNA” to describe modified oligonucleotides is, in certain instances, arbitrary. For example, an oligonucleotide comprising a nucleoside comprising a 2′-OH sugar moiety and a thymine base could be described as a DNA having a modified sugar (2′-OH for the natural 2′-H of DNA) or as an RNA having a modified base (thymine (methylated uracil) for natural uracil of RNA).

[0508] Accordingly, nucleic acid sequences provided herein, including, but not limited to, those in the sequence listing, are intended to encompass nucleic acids containing any combination of natural or modified RNA and/or DNA, including, but not limited to, such nucleic acids having modified nucleobases. By way of further example and without limitation, an oligonucleotide having the nucleobase sequence “ATCGATCG” encompasses any oligonucleotides having such nucleobase sequence, whether modified or unmodified, including, but not limited to, such compounds comprising RNA bases, such as those having sequence “AUCGAUCG” and those having some DNA bases and some RNA bases such as “AUCGATCG” and compounds having other modified nucleobases, such as “ATmCGAUCG,” wherein mC indicates a cytosine base comprising a methyl group at the 5-position.

[0509] Certain compounds described herein (e.g. modified oligonucleotides) have one or more asymmetric centers and thus give rise to enantiomers, diastereomers, and other stereoisomeric configurations that may be defined, in terms of absolute stereochemistry, as (R) or (S), as α or β, such as for sugar anomers, or as (D) or (L), such as for amino acids, etc. Compounds provided herein that are drawn or described as having certain stereoisomeric configurations include only the indicated compounds. Compounds provided herein that are drawn or described with undefined stereochemistry include all such possible isomers, including their stereorandom and optically pure forms. Likewise, all tautomeric forms of the compounds provided herein are included unless otherwise indicated. Unless otherwise indicated, oligomeric compounds and modified oligonucleotides described herein are intended to include corresponding salt forms.

[0510] Compounds described herein include variations in which one or more atoms are replaced with a non-radioactive isotope or radioactive isotope of the indicated element. For example, compounds herein that comprise hydrogen atoms encompass all possible deuterium substitutions for each of the ¹H hydrogen atoms. Isotopic substitutions encompassed by the compounds herein include, but are not limited to: ²H or ³H in place of ¹H, ¹³C or ¹⁴C in place of ¹²C, ¹⁵N in place of ¹⁴N, ¹⁷O or ¹⁸O in place of ¹⁶O, and ³³S, ³⁴S, ³⁵S, or ³⁶S in place of ³²S.

[0511] While certain compounds, compositions and methods described herein have been described with specificity in accordance with certain embodiments, the following examples serve only to illustrate the compounds described herein and are not intended to limit the same. Each of the references recited in the present application is incorporated herein by reference in its entirety.

### Example 1: Antisense Inhibition of Human HSD17B13 in HepaRG Cells by cEt Gapmers

[0512] Modified oligonucleotides complementary to an HSD17B13 nucleic acid were synthesized and tested for their effect on HSD17B13 RNA levels in vitro. The modified oligonucleotides were tested in a series of experiments using the same culture conditions. The results for each separate experiment are presented in tables below.

[0513] The modified oligonucleotides were all 3-10-3 cEt gapmers (i.e. had a central gap segment of ten 2′-deoxynucleosides flanked on each side by wing segments each comprising three cEt modified nucleosides). The internucleoside linkages throughout each modified oligonucleotide were phosphorothioate (P═S) linkages. All cytosine nucleobases throughout each modified oligonucleotide were 5-methylcytosines.

[0514] “Start site” indicates the 5′-most nucleoside of the target sequence to which the modified oligonucleotide is complementary. “Stop site” indicates the 3′-most nucleoside of the target sequence to which the modified oligonucleotide is complementary. As shown in the Tables below, the modified oligonucleotide are complementary to either the human HSD17B13 mRNA, designated herein as SEQ ID NO: 1 (GENBANK Accession No. NM_178135.4) or to the human HSD17B13 genomic sequence, designated herein as SEQ ID NO: 2 (the complement of GENBANK Accession No. NC_000004.12 truncated from nucleotides 87301001 to 87326000) or to both. ‘N/A’ indicates that the modified oligonucleotide is not complementary to that particular target sequence with 100% complementarity.

[0515] Cultured HepaRG cells at a density of 20,000 cells per well were transfected using electroporation with 1,000 nM of modified oligonucleotide. After a treatment period of approximately 24 hours, RNA was isolated from the cells and HSD17B13 RNA levels were measured by quantitative real-time RTPCR. Human primer probe set RTS43553 (forward sequence AGACTACAGAAGTTTCTTCCTGAAC, designated herein as SEQ ID NO: 5; reverse sequence CATCTCTGGCTGGAGCTTATTT, designated herein as SEQ ID NO: 6; probe sequence TTTGAAGCAGTGGTTGGCCACAAA, designated herein as SEQ ID NO: 7) was used to measure RNA levels. HSD17B13 RNA levels were normalized to total RNA content, as measured by RIBOGREEN®. Results are presented as percent inhibition of HSD17B13 relative to untreated control cells. As used herein, a value of ‘0’ indicates that treatment with the modified oligonucleotide did not inhibit HSD17B13 mRNA levels. An asterisk (*) indicates that the modified oligonucleotide is complementary to the target transcript within the amplicon region of the primer probe set and so, the associated data is not reliable. In such instances, additional using alternate primer probe sets must be performed to accurately assess the potency and efficacy of such modified oligonucleotides.

TABLE 1
Inhibition of HSD17B13 RNA by 3-10-3 cEt gapmers
targeting SEQ ID NO: 1 and 2

| | SEQ | | SEQ | | | | |
|---|---|---|---|---|---|---|---|
| | ID | SEQ | ID | SEQ | | | |
| | NO: 1 | ID NO: | NO: 2 | ID NO: | | HSD17B13 | SEQ |
| Compound | Start | 1 Stop | Start | 2 Stop | Sequence | (% | ID |
| Number | Site | Site | Site | Site | (5′ to 3′) | Inhibition) | NO |
| 1245068 | 1 | 16 | 3095 | 3110 | GGAGGAGGTACTGTCT | 44 | 8 |
| 1245094 | 59 | 74 | 3153 | 3168 | GATGTTCATGGCTTTG | 81 | 9 |
| 1245120 | 111 | 126 | 3205 | 3220 | ACTCCAAGTAGGAGTA | 0 | 10 |
| 1245146 | 181 | 196 | 3275 | 3290 | GCTCCAGTAATGAGAA | 34 | 11 |
| 1245172 | 251 | 266 | 3345 | 3360 | ATCCCACAGAACCAAT | 34 | 12 |
| 1245198 | 299 | 314 | 7588 | 7603 | TAGTTTTCGGCACTCA | 35 | 13 |
| 1245224 | 359 | 374 | 7648 | 7663 | AGAGCGATAGATCTCT | 8 | 14 |
| 1245250 | 402 | 417 | 8796 | 8811 | CCACGATTGTTACATC | 42 | 15 |
| 1245276 | 432 | 447 | 8826 | 8841 | CGGCTGGATATACTGT | 35 | 16 |
| 1245302 | 473 | 488 | 8867 | 8882 | AAATGTCTTGGTAATC | 30 | 17 |
| 1245328 | 515 | 530 | 10401 | 10416 | AAGTGCTTTTGTGATC | 41 | 18 |
| 1245354 | 561 | 576 | 10447 | 10462 | CCACTGTGACGATGTG | 0 | 19 |
| 1245380 | 614 | 629 | N/A | N/A | GCTGGAACAATATGGG | 36 | 20 |
| 1245406 | 670 | 685 | 12088 | 12103 | CCCAAGGCCTGAAGTT | 61 | 21 |
| 1245432 | 759 | 774 | 15640 | 15655 | ATACAGGCCATAATCT | 0 | 22 |
| 1245458 | 790 | 805 | 15671 | 15686 | ATCAGACTTCTTACGA | 45 | 23 |
| 1245484 | 842 | 857 | 15723 | 15738 | ATTGATATACGATGGA | 31 | 24 |
| 1245510* | 907 | 922 | 20722 | 20737 | TTCTGCATACGATTTA | 83 | 25 |
| 1245536* | 973 | 988 | 20788 | 20803 | TCTGGCTGGAGCTTAT | 85 | 26 |
| 1245562 | 1014 | 1029 | 20829 | 20844 | CATTGATTCGAAACTA | 40 | 27 |
| 1245588 | 1088 | 1103 | 20903 | 20918 | TTGACTGCTGCTAGTG | 30 | 28 |
| 1245614 | 1260 | 1275 | 21075 | 21090 | GGTAGCTTTTGTCCAC | 66 | 29 |
| 1245640 | 1314 | 1329 | 21129 | 21144 | CAGTCTTAAACCTTCC | 70 | 30 |
| 1245666 | 1341 | 1356 | 21156 | 21171 | TGGCTACAGATTGGAA | 55 | 31 |
| 1245692 | 1385 | 1400 | 21200 | 21215 | TTAGCTGTGCACTCAT | 61 | 32 |
| 1245718 | 1423 | 1438 | 21238 | 21253 | CCAGGTTGAGATAAAG | 49 | 33 |
| 1245744 | 1499 | 1514 | 21314 | 21329 | AGAGTTGCACCGTTTT | 76 | 34 |
| 1245770 | 1558 | 1573 | 21373 | 21388 | CACTTTTGGTGGACTT | 21 | 35 |
| 1245796 | 1617 | 1632 | 21432 | 21447 | CGGTCACCTTTCATAA | 69 | 36 |
| 1245822 | 1710 | 1725 | 21525 | 21540 | ATCTCTGGGACCAAGG | 72 | 37 |
| 1245841 | 1765 | 1780 | 21580 | 21595 | GTACAGTTCCTTTTCC | 55 | 38 |
| 1245848 | 1772 | 1787 | 21587 | 21602 | ATAGCCAGTACAGTTC | 65 | 39 |
| 1245874 | 2177 | 2192 | 21992 | 22007 | GGAGTCGGATTATTTT | 41 | 40 |
| 1245900 | 2244 | 2259 | 22059 | 22074 | GTCCATGCAAAAGCAT | 62 | 41 |
| 1245926 | N/A | N/A | 3405 | 3420 | AATACATATCTTACTC | 37 | 42 |
| 1245952 | N/A | N/A | 3552 | 3567 | GTCATAAAAATCGCTG | 72 | 43 |
| 1245978 | N/A | N/A | 3948 | 3963 | GAAAAGCCTGACTCAC | 48 | 44 |
| 1246004 | N/A | N/A | 4517 | 4532 | CATCAAGCCCTTTTCA | 23 | 45 |
| 1246030 | N/A | N/A | 5078 | 5093 | CTAAAGGAGATCTGAG | 47 | 46 |
| 1246056 | N/A | N/A | 5222 | 5237 | TAGCTTAAACTCCAAT | 60 | 47 |
| 1246065 | N/A | N/A | 5659 | 5674 | ATAAGTTACCAGAGCA | 87 | 48 |
| 1246082 | N/A | N/A | 5817 | 5832 | CTCAAAGTCAGTATCC | 70 | 49 |
| 1246108 | N/A | N/A | 5989 | 6004 | GGCAAGGATACCTGAA | 67 | 50 |
| 1246134 | N/A | N/A | 6233 | 6248 | CTCATTTATGTACCAA | 87 | 51 |
| 1246160 | N/A | N/A | 6474 | 6489 | TATGTAATAGGCAGTA | 62 | 52 |
| 1246186 | N/A | N/A | 7482 | 7497 | GACAATTAACATTCGG | 69 | 53 |
| 1246212 | N/A | N/A | 7951 | 7966 | CTAGGAAGTGATCCAT | 66 | 54 |
| 1246238 | N/A | N/A | 8243 | 8258 | CTAATAACTACATGAC | 18 | 55 |
| 1246264 | N/A | N/A | 8694 | 8709 | TCCAAAGATGAGAGTC | 17 | 56 |
| 1246290 | N/A | N/A | 9002 | 9017 | GCAAAGATCTGGCCAG | 22 | 57 |
| 1246316 | N/A | N/A | 9348 | 9363 | TCCAAAAGTGTCCTCG | 31 | 58 |
| 1246342 | N/A | N/A | 9518 | 9533 | CTACACTAATATTGAG | 20 | 59 |
| 1246368 | N/A | N/A | 9715 | 9730 | AGTGAACATACATTGT | 48 | 60 |
| 1246394 | N/A | N/A | 9981 | 9996 | ATTAAGACAGTTGAGT | 34 | 61 |
| 1246420 | N/A | N/A | 10211 | 10226 | ATTTATTGGTATGGTA | 46 | 62 |
| 1246446 | N/A | N/A | 10730 | 10745 | CTGTAATTGGCTCTTG | 28 | 63 |
| 1246472 | N/A | N/A | 11261 | 11276 | TCTTATCTTGGGCACC | 44 | 64 |
| 1246498 | N/A | N/A | 11742 | 11757 | TCCATTGAATCTTCAA | 57 | 65 |
| 1246524 | N/A | N/A | 11985 | 12000 | GAAACCAATCCTCAGC | 3 | 66 |
| 1246550 | N/A | N/A | 12421 | 12436 | TGGTAACGGTGATCAA | 74 | 67 |
| 1246576 | N/A | N/A | 12624 | 12639 | TTAAGCAGATGGCTTA | 0 | 68 |
| 1246602 | N/A | N/A | 12761 | 12776 | ACAGAGAATTGTTTAG | 39 | 69 |
| 1246628 | N/A | N/A | 13605 | 13620 | AGACAATACAGGATAG | 15 | 70 |
| 1246654 | N/A | N/A | 13862 | 13877 | CCTTAGGAAAGCTCAT | 29 | 71 |
| 1246680 | N/A | N/A | 14041 | 14056 | ATCAATGCCTTAGCCC | 38 | 72 |
| 1246706 | N/A | N/A | 14199 | 14214 | TATTATGTGATTGAGT | 86 | 73 |
| 1246732 | N/A | N/A | 14399 | 14414 | ATTCATAAACATAGGC | 36 | 74 |
| 1246758 | N/A | N/A | 14730 | 14745 | ACTCTAAATACCCTTG | 16 | 75 |
| 1246784 | N/A | N/A | 15316 | 15331 | GGATTAATCATGGGAC | 44 | 76 |
| 1246810 | N/A | N/A | 15405 | 15420 | TCATAGCTCACTTAGT | 0 | 77 |
| 1246836 | N/A | N/A | 15775 | 15790 | TTTAGTATTTGGGTGT | 21 | 78 |
| 1246862 | N/A | N/A | 16407 | 16422 | CAATTGCTCTATAGAT | 15 | 79 |
| 1246888 | N/A | N/A | 17767 | 17782 | AGCATATTCATTTGGC | 61 | 80 |
| 1246914 | N/A | N/A | 18033 | 18048 | AGTTTATATGGATTTG | 67 | 81 |
| 1246940 | N/A | N/A | 18816 | 18831 | CTAGTAATTGCATCTG | 57 | 82 |
| 1246966 | N/A | N/A | 19445 | 19460 | CTGGGATAGTGGAGGA | 21 | 83 |
| 1246992 | N/A | N/A | 19686 | 19701 | GCTAAAAGCTCACCAA | 26 | 84 |
| 1247018 | N/A | N/A | 19902 | 19917 | GATACCCAGGTTGCTT | 53 | 85 |
| 1247044 | N/A | N/A | 20186 | 20201 | ATTAGAAGTCAGCCCA | 42 | 86 |
| 1247070 | N/A | N/A | 20401 | 20416 | GCTATAGTAATTGCTA | 33 | 87 |

TABLE 2
Inhibition of HSD17B13 RNA by 3-10-3 cEt gapmers targeting SEQ ID NO: 1 and 2

| | SEQ | | SEQ | | | | |
|---|---|---|---|---|---|---|---|
| | ID | SEQ | ID | SEQ | | | |
| | NO: 1 | ID NO: | NO: 2 | ID NO: | | HSD17B13 | SEQ |
| Compound | Start | 1 Stop | Start | 2 Stop | Sequence | (% | ID |
| Number | Site | Site | Site | Site | (5′ to 3′) | Inhibition) | NO |
| 1245069 | 2 | 17 | 3096 | 3111 | GGGAGGAGGTACTGTC | 35 | 88 |
| 1245095 | 61 | 76 | 3155 | 3170 | ATGATGTTCATGGCTT | 72 | 89 |
| 1245121 | 112 | 127 | 3206 | 3221 | GACTCCAAGTAGGAGT | 0 | 90 |
| 1245147 | 182 | 197 | 3276 | 3291 | AGCTCCAGTAATGAGA | 26 | 91 |
| 1245173 | 263 | 278 | N/A | N/A | GCGCTTATTAATATCC | 3 | 92 |
| 1245199 | 300 | 315 | 7589 | 7604 | CTAGTTTTCGGCACTC | 33 | 93 |
| 1245225 | 360 | 375 | 7649 | 7664 | GAGAGCGATAGATCTC | 1 | 94 |
| 1245251 | 403 | 418 | 8797 | 8812 | ACCACGATTGTTACAT | 34 | 95 |
| 1245277 | 433 | 448 | 8827 | 8842 | TCGGCTGGATATACTG | 23 | 96 |
| 1245303 | 476 | 491 | 8870 | 8885 | CTCAAATGTCTTGGTA | 29 | 97 |
| 1245329 | 516 | 531 | 10402 | 10417 | GAAGTGCTTTTGTGAT | 34 | 98 |
| 1245355 | 562 | 577 | 10448 | 10463 | GCCACTGTGACGATGT | 9 | 99 |
| 1245381 | 615 | 630 | N/A | N/A | TGCTGGAACAATATGG | 36 | 100 |
| 1245407 | 671 | 686 | 12089 | 12104 | TCCCAAGGCCTGAAGT | 43 | 101 |
| 1245433 | 760 | 775 | 15641 | 15656 | AATACAGGCCATAATC | 16 | 102 |
| 1245459 | 791 | 806 | 15672 | 15687 | TATCAGACTTCTTACG | 59 | 103 |
| 1245485 | 843 | 858 | 15724 | 15739 | TATTGATATACGATGG | 16 | 104 |
| 1245511* | 908 | 923 | 20723 | 20738 | ATTCTGCATACGATTT | 89 | 105 |
| 1245537* | 974 | 989 | 20789 | 20804 | CTCTGGCTGGAGCTTA | 86 | 106 |
| 1245563 | 1015 | 1030 | 20830 | 20845 | GCATTGATTCGAAACT | 66 | 107 |
| 1245589 | 1089 | 1104 | 20904 | 20919 | TTTGACTGCTGCTAGT | 21 | 108 |
| 1245615 | 1261 | 1276 | 21076 | 21091 | AGGTAGCTTTTGTCCA | 56 | 109 |
| 1245641 | 1315 | 1330 | 21130 | 21145 | ACAGTCTTAAACCTTC | 76 | 110 |
| 1245667 | 1342 | 1357 | 21157 | 21172 | ATGGCTACAGATTGGA | 72 | 111 |
| 1245693 | 1386 | 1401 | 21201 | 21216 | CTTAGCTGTGCACTCA | 60 | 112 |
| 1245719 | 1425 | 1440 | 21240 | 21255 | GTCCAGGTTGAGATAA | 60 | 113 |
| 1245745 | 1500 | 1515 | 21315 | 21330 | TAGAGTTGCACCGTTT | 58 | 114 |
| 1245771 | 1559 | 1574 | 21374 | 21389 | CCACTTTTGGTGGACT | 17 | 115 |
| 1245797 | 1618 | 1633 | 21433 | 21448 | TCGGTCACCTTTCATA | 64 | 116 |
| 1245823 | 1711 | 1726 | 21526 | 21541 | CATCTCTGGGACCAAG | 51 | 117 |
| 1245841 | 1765 | 1780 | 21580 | 21595 | GTACAGTTCCTTTTCC | 46 | 38 |
| 1245849 | 1773 | 1788 | 21588 | 21603 | AATAGCCAGTACAGTT | 46 | 118 |
| 1245875 | 2178 | 2193 | 21993 | 22008 | GGGAGTCGGATTATTT | 33 | 119 |
| 1245901 | 2245 | 2260 | 22060 | 22075 | AGTCCATGCAAAAGCA | 77 | 120 |
| 1245927 | N/A | N/A | 3433 | 3448 | AGTAGATGGTAAGTCA | 90 | 121 |
| 1245953 | N/A | N/A | 3553 | 3568 | TGTCATAAAAATCGCT | 57 | 122 |
| 1245979 | N/A | N/A | 3962 | 3977 | TACTAATGTCCAAGGA | 77 | 123 |
| 1246005 | N/A | N/A | 4529 | 4544 | AAGGTTAGATTTCATC | 80 | 124 |
| 1246031 | N/A | N/A | 5079 | 5094 | CCTAAAGGAGATCTGA | 48 | 125 |
| 1246057 | N/A | N/A | 5225 | 5240 | CTTTAGCTTAAACTCC | 69 | 126 |
| 1246065 | N/A | N/A | 5659 | 5674 | ATAAGTTACCAGAGCA | 84 | 48 |
| 1246083 | N/A | N/A | 5833 | 5848 | GATGTTAGGACCCAGT | 64 | 127 |
| 1246109 | N/A | N/A | 5990 | 6005 | AGGCAAGGATACCTGA | 42 | 128 |
| 1246135 | N/A | N/A | 6298 | 6313 | GGAGATATAACATTAC | 70 | 129 |
| 1246161 | N/A | N/A | 6475 | 6490 | CTATGTAATAGGCAGT | 73 | 130 |
| 1246187 | N/A | N/A | 7483 | 7498 | AGACAATTAACATTCG | 62 | 131 |
| 1246213 | N/A | N/A | 7952 | 7967 | ACTAGGAAGTGATCCA | 58 | 132 |
| 1246239 | N/A | N/A | 8244 | 8259 | CCTAATAACTACATGA | 3 | 133 |
| 1246265 | N/A | N/A | 8695 | 8710 | ATCCAAAGATGAGAGT | 5 | 134 |
| 1246291 | N/A | N/A | 9003 | 9018 | GGCAAAGATCTGGCCA | 10 | 135 |
| 1246317 | N/A | N/A | 9349 | 9364 | GTCCAAAAGTGTCCTC | 35 | 136 |
| 1246343 | N/A | N/A | 9526 | 9541 | CCTAGATTCTACACTA | 14 | 137 |
| 1246369 | N/A | N/A | 9718 | 9733 | GATAGTGAACATACAT | 54 | 138 |
| 1246395 | N/A | N/A | 9983 | 9998 | GTATTAAGACAGTTGA | 45 | 139 |
| 1246421 | N/A | N/A | 10212 | 10227 | AATTTATTGGTATGGT | 30 | 140 |
| 1246447 | N/A | N/A | 10831 | 10846 | GTAAACGACTCTGTAA | 8 | 141 |
| 1246473 | N/A | N/A | 11308 | 11323 | GCACAAGCACACTGTA | 7 | 142 |
| 1246499 | N/A | N/A | 11758 | 11773 | CTACATGTAAGGTTTT | 11 | 143 |
| 1246525 | N/A | N/A | 12000 | 12015 | TAGCTAAGGGAGAGTG | 9 | 144 |
| 1246551 | N/A | N/A | 12429 | 12444 | AGACAGGGTGGTAACG | 51 | 145 |
| 1246577 | N/A | N/A | 12625 | 12640 | GTTAAGCAGATGGCTT | 41 | 146 |
| 1246603 | N/A | N/A | 12765 | 12780 | CTCAACAGAGAATTGT | 29 | 147 |
| 1246629 | N/A | N/A | 13612 | 13627 | GCTTTGAAGACAATAC | 42 | 148 |
| 1246655 | N/A | N/A | 13863 | 13878 | CCCTTAGGAAAGCTCA | 37 | 149 |
| 1246681 | N/A | N/A | 14042 | 14057 | TATCAATGCCTTAGCC | 15 | 150 |
| 1246707 | N/A | N/A | 14200 | 14215 | TTATTATGTGATTGAG | 23 | 151 |
| 1246733 | N/A | N/A | 14432 | 14447 | ACTGAAGGCTGTGTAC | 14 | 152 |
| 1246759 | N/A | N/A | 14731 | 14746 | AACTCTAAATACCCTT | 28 | 153 |
| 1246785 | N/A | N/A | 15317 | 15332 | AGGATTAATCATGGGA | 37 | 154 |
| 1246811 | N/A | N/A | 15407 | 15422 | TTTCATAGCTCACTTA | 16 | 155 |
| 1246837 | N/A | N/A | 15787 | 15802 | CTCTATTGGTGTTTTA | 32 | 156 |
| 1246863 | N/A | N/A | 16416 | 16431 | AATACTCCCCAATTGC | 0 | 157 |
| 1246889 | N/A | N/A | 17780 | 17795 | AGAAGATATTATCAGC | 64 | 158 |
| 1246915 | N/A | N/A | 18087 | 18102 | CACCAATGCAGTTTGT | 42 | 159 |
| 1246941 | N/A | N/A | 18817 | 18832 | GCTAGTAATTGCATCT | 47 | 160 |
| 1246967 | N/A | N/A | 19474 | 19489 | GCTATAACTGGAAGGA | 58 | 161 |
| 1246993 | N/A | N/A | 19687 | 19702 | TGCTAAAAGCTCACCA | 49 | 162 |
| 1247019 | N/A | N/A | 19906 | 19921 | TTAAGATACCCAGGTT | 37 | 163 |
| 1247045 | N/A | N/A | 20187 | 20202 | TATTAGAAGTCAGCCC | 27 | 164 |
| 1247071 | N/A | N/A | 20402 | 20417 | GGCTATAGTAATTGCT | 13 | 165 |

TABLE 3
Inhibition of HSD17B13 RNA by 3-10-3 cEt gapmers targeting SEQ ID NO: 1 and 2

| | SEQ | | SEQ | | | | |
|---|---|---|---|---|---|---|---|
| | ID | SEQ | ID | SEQ | | | |
| | NO: 1 | ID NO: | NO: 2 | ID NO: | | HSD17B13 | SEQ |
| Compound | Start | 1 Stop | Start | 2 Stop | Sequence | (% | ID |
| Number | Site | Site | Site | Site | (5′ to 3′) | Inhibition) | NO |
| 1245070 | 5 | 20 | 3099 | 3114 | CTAGGGAGGAGGTACT | 29 | 166 |
| 1245096 | 62 | 77 | 3156 | 3171 | GATGATGTTCATGGCT | 86 | 167 |
| 1245122 | 113 | 128 | 3207 | 3222 | CGACTCCAAGTAGGAG | 10 | 168 |
| 1245148 | 200 | 215 | 3294 | 3309 | CCTGCCTATTCCATGC | 24 | 169 |
| 1245174 | 264 | 279 | N/A | N/A | CGCGCTTATTAATATC | 6 | 170 |
| 1245200 | 301 | 316 | 7590 | 7605 | CCTAGTTTTCGGCACT | 62 | 171 |
| 1245226 | 361 | 376 | 7650 | 7665 | AGAGAGCGATAGATCT | 15 | 172 |
| 1245252 | 404 | 419 | 8798 | 8813 | CACCACGATTGTTACA | 36 | 173 |
| 1245278 | 434 | 449 | 8828 | 8843 | ATCGGCTGGATATACT | 10 | 174 |
| 1245304 | 477 | 492 | 8871 | 8886 | CCTCAAATGTCTTGGT | 6 | 175 |
| 1245330 | 524 | 539 | 10410 | 10425 | CGATGGAAGAAGTGCT | 3 | 176 |
| 1245356 | 563 | 578 | 10449 | 10464 | AGCCACTGTGACGATG | 10 | 177 |
| 1245382 | 616 | 631 | N/A | N/A | TTGCTGGAACAATATG | 20 | 178 |
| 1245408 | 688 | 703 | 12106 | 12121 | GTTTTGATACCAGTTT | 67 | 179 |
| 1245434 | 761 | 776 | 15642 | 15657 | CAATACAGGCCATAAT | 0 | 180 |
| 1245460 | 792 | 807 | 15673 | 15688 | CTATCAGACTTCTTAC | 39 | 181 |
| 1245486 | 844 | 859 | 15725 | 15740 | ATATTGATATACGATG | 0 | 182 |
| 1245512* | 909 | 924 | 20724 | 20739 | TATTCTGCATACGATT | 81 | 183 |
| 1245538* | 975 | 990 | 20790 | 20805 | TCTCTGGCTGGAGCTT | 90 | 184 |
| 1245564 | 1016 | 1031 | 20831 | 20846 | AGCATTGATTCGAAAC | 70 | 185 |
| 1245590 | 1090 | 1105 | 20905 | 20920 | GTTTGACTGCTGCTAG | 58 | 186 |
| 1245616 | 1262 | 1277 | 21077 | 21092 | GAGGTAGCTTTTGTCC | 59 | 187 |
| 1245642 | 1316 | 1331 | 21131 | 21146 | AACAGTCTTAAACCTT | 82 | 188 |
| 1245668 | 1343 | 1358 | 21158 | 21173 | CATGGCTACAGATTGG | 54 | 189 |
| 1245694 | 1387 | 1402 | 21202 | 21217 | TCTTAGCTGTGCACTC | 69 | 190 |
| 1245720 | 1426 | 1441 | 21241 | 21256 | TGTCCAGGTTGAGATA | 48 | 191 |
| 1245746 | 1501 | 1516 | 21316 | 21331 | ATAGAGTTGCACCGTT | 57 | 192 |
| 1245772 | 1560 | 1575 | 21375 | 21390 | TCCACTTTTGGTGGAC | 16 | 193 |
| 1245798 | 1619 | 1634 | 21434 | 21449 | GTCGGTCACCTTTCAT | 85 | 194 |
| 1245824 | 1712 | 1727 | 21527 | 21542 | ACATCTCTGGGACCAA | 78 | 195 |
| 1245841 | 1765 | 1780 | 21580 | 21595 | GTACAGTTCCTTTTCC | 64 | 38 |
| 1245850 | 1774 | 1789 | 21589 | 21604 | TAATAGCCAGTACAGT | 64 | 196 |
| 1245876 | 2179 | 2194 | 21994 | 22009 | TGGGAGTCGGATTATT | 44 | 197 |
| 1245902 | 2246 | 2261 | 22061 | 22076 | TAGTCCATGCAAAAGC | 66 | 198 |
| 1245928 | N/A | N/A | 3434 | 3449 | AAGTAGATGGTAAGTC | 85 | 199 |
| 1245954 | N/A | N/A | 3554 | 3569 | ATGTCATAAAAATCGC | 53 | 200 |
| 1245980 | N/A | N/A | 3963 | 3978 | ATACTAATGTCCAAGG | 89 | 201 |
| 1246006 | N/A | N/A | 4535 | 4550 | GATTTGAAGGTTAGAT | 47 | 202 |
| 1246032 | N/A | N/A | 5080 | 5095 | GCCTAAAGGAGATCTG | 67 | 203 |
| 1246058 | N/A | N/A | 5239 | 5254 | TAGCAAAACACTTGCT | 21 | 204 |
| 1246065 | N/A | N/A | 5659 | 5674 | ATAAGTTACCAGAGCA | 87 | 48 |
| 1246084 | N/A | N/A | 5834 | 5849 | GGATGTTAGGACCCAG | 81 | 205 |
| 1246110 | N/A | N/A | 6035 | 6050 | ATACTTTTCCGTCTCA | 90 | 206 |
| 1246136 | N/A | N/A | 6303 | 6318 | CTCTAGGAGATATAAC | 49 | 207 |
| 1246162 | N/A | N/A | 6476 | 6491 | ACTATGTAATAGGCAG | 85 | 208 |
| 1246188 | N/A | N/A | 7681 | 7696 | AAATTTGTGAACCTGC | 26 | 209 |
| 1246214 | N/A | N/A | 7953 | 7968 | AACTAGGAAGTGATCC | 58 | 210 |
| 1246240 | N/A | N/A | 8245 | 8260 | ACCTAATAACTACATG | 0 | 211 |
| 1246266 | N/A | N/A | 8703 | 8718 | CCAATATAATCCAAAG | 28 | 212 |
| 1246292 | N/A | N/A | 9006 | 9021 | TAAGGCAAAGATCTGG | 46 | 213 |
| 1246318 | N/A | N/A | 9350 | 9365 | CGTCCAAAAGTGTCCT | 53 | 214 |
| 1246344 | N/A | N/A | 9527 | 9542 | CCCTAGATTCTACACT | 22 | 215 |
| 1246370 | N/A | N/A | 9719 | 9734 | GGATAGTGAACATACA | 62 | 216 |
| 1246396 | N/A | N/A | 9984 | 9999 | TGTATTAAGACAGTTG | 34 | 217 |
| 1246422 | N/A | N/A | 10335 | 10350 | CCAAATCAGGTAGTTT | 13 | 218 |
| 1246448 | N/A | N/A | 10832 | 10847 | AGTAAACGACTCTGTA | 33 | 219 |
| 1246474 | N/A | N/A | 11385 | 11400 | TTTTAGTCAGGTAGAG | 3 | 220 |
| 1246500 | N/A | N/A | 11761 | 11776 | ATCCTACATGTAAGGT | 24 | 221 |
| 1246526 | N/A | N/A | 12002 | 12017 | GTTAGCTAAGGGAGAG | 18 | 222 |
| 1246552 | N/A | N/A | 12433 | 12448 | TTAAAGACAGGGTGGT | 21 | 223 |
| 1246578 | N/A | N/A | 12626 | 12641 | TGTTAAGCAGATGGCT | 39 | 224 |
| 1246604 | N/A | N/A | 12777 | 12792 | AATGAGGCGGCACTCA | 20 | 225 |
| 1246630 | N/A | N/A | 13639 | 13654 | TGACAATGTGCAGCTC | 64 | 226 |
| 1246656 | N/A | N/A | 13864 | 13879 | ACCCTTAGGAAAGCTC | 52 | 227 |
| 1246682 | N/A | N/A | 14043 | 14058 | ATATCAATGCCTTAGC | 32 | 228 |
| 1246708 | N/A | N/A | 14202 | 14217 | GATTATTATGTGATTG | 39 | 229 |
| 1246734 | N/A | N/A | 14435 | 14450 | TATACTGAAGGCTGTG | 44 | 230 |
| 1246760 | N/A | N/A | 14800 | 14815 | GAATTGCTCACCCTTT | 24 | 231 |
| 1246786 | N/A | N/A | 15318 | 15333 | TAGGATTAATCATGGG | 47 | 232 |
| 1246812 | N/A | N/A | 15418 | 15433 | CAGTAGGTGTGTTTCA | 47 | 233 |
| 1246838 | N/A | N/A | 15793 | 15808 | AAAAAGCTCTATTGGT | 0 | 234 |
| 1246864 | N/A | N/A | 16424 | 16439 | GATATGTCAATACTCC | 59 | 235 |
| 1246890 | N/A | N/A | 17857 | 17872 | CATTTGAAGTCTATAC | 21 | 236 |
| 1246916 | N/A | N/A | 18091 | 18106 | GATACACCAATGCAGT | 73 | 237 |
| 1246942 | N/A | N/A | 18818 | 18833 | TGCTAGTAATTGCATC | 17 | 238 |
| 1246968 | N/A | N/A | 19475 | 19490 | GGCTATAACTGGAAGG | 52 | 239 |
| 1246994 | N/A | N/A | 19688 | 19703 | ATGCTAAAAGCTCACC | 50 | 240 |
| 1247020 | N/A | N/A | 19907 | 19922 | CTTAAGATACCCAGGT | 36 | 241 |
| 1247046 | N/A | N/A | 20188 | 20203 | TTATTAGAAGTCAGCC | 36 | 242 |
| 1247072 | N/A | N/A | 20403 | 20418 | TGGCTATAGTAATTGC | 34 | 243 |

TABLE 4
Inhibition of HSD17B13 RNA by 3-10-3 cEt gapmers targeting SEQ ID NO: 1, and 2

| | SEQ | | SEQ | | | | |
|---|---|---|---|---|---|---|---|
| | ID | SEQ | ID | SEQ | | | |
| | NO: 1 | ID NO: | NO: 2 | ID NO: | | HSD17B13 | SEQ |
| Compound | Start | 1 Stop | Start | 2 Stop | Sequence | (% | ID |
| Number | Site | Site | Site | Site | (5′ to 3′) | Inhibition) | NO |
| 1245071 | 6 | 21 | 3100 | 3115 | CCTAGGGAGGAGGTAC | 34 | 244 |
| 1245097 | 63 | 78 | 3157 | 3172 | GGATGATGTTCATGGC | 82 | 245 |
| 1245123 | 114 | 129 | 3208 | 3223 | ACGACTCCAAGTAGGA | 24 | 246 |
| 1245149 | 202 | 217 | 3296 | 3311 | TGCCTGCCTATTCCAT | 40 | 247 |
| 1245175 | 265 | 280 | N/A | N/A | CCGCGCTTATTAATAT | 21 | 248 |
| 1245201 | 302 | 317 | 7591 | 7606 | GCCTAGTTTTCGGCAC | 12 | 249 |
| 1245227 | 362 | 377 | 7651 | 7666 | TAGAGAGCGATAGATC | 22 | 250 |
| 1245253 | 405 | 420 | 8799 | 8814 | TCACCACGATTGTTAC | 34 | 251 |
| 1245279 | 435 | 450 | 8829 | 8844 | GATCGGCTGGATATAC | 7 | 252 |
| 1245305 | 478 | 493 | 8872 | 8887 | ACCTCAAATGTCTTGG | 17 | 253 |
| 1245331 | 525 | 540 | 10411 | 10426 | TCGATGGAAGAAGTGC | 34 | 254 |
| 1245357 | 566 | 581 | 10452 | 10467 | TGAAGCCACTGTGACG | 49 | 255 |
| 1245383 | 623 | 638 | 12041 | 12056 | GGCAAATTTGCTGGAA | 54 | 256 |
| 1245409 | 689 | 704 | 12107 | 12122 | GGTTTTGATACCAGTT | 58 | 257 |
| 1245435 | 762 | 777 | 15643 | 15658 | CCAATACAGGCCATAA | 38 | 258 |
| 1245461 | 793 | 808 | 15674 | 15689 | TCTATCAGACTTCTTA | 49 | 259 |
| 1245487 | 845 | 860 | 15726 | 15741 | GATATTGATATACGAT | 2 | 260 |
| 1245513* | 910 | 925 | 20725 | 20740 | ATATTCTGCATACGAT | 36 | 261 |
| 1245539* | 977 | 992 | 20792 | 20807 | CATCTCTGGCTGGAGC | 79 | 262 |
| 1245565 | 1017 | 1032 | 20832 | 20847 | CAGCATTGATTCGAAA | 69 | 263 |
| 1245591 | 1091 | 1106 | 20906 | 20921 | CGTTTGACTGCTGCTA | 58 | 264 |
| 1245617 | 1263 | 1278 | 21078 | 21093 | GGAGGTAGCTTTTGTC | 43 | 265 |
| 1245643 | 1317 | 1332 | 21132 | 21147 | GAACAGTCTTAAACCT | 64 | 266 |
| 1245669 | 1344 | 1359 | 21159 | 21174 | GCATGGCTACAGATTG | 56 | 267 |
| 1245695 | 1388 | 1403 | 21203 | 21218 | CTCTTAGCTGTGCACT | 53 | 268 |
| 1245721 | 1427 | 1442 | 21242 | 21257 | ATGTCCAGGTTGAGAT | 55 | 269 |
| 1245747 | 1502 | 1517 | 21317 | 21332 | AATAGAGTTGCACCGT | 48 | 270 |
| 1245773 | 1561 | 1576 | 21376 | 21391 | GTCCACTTTTGGTGGA | 14 | 271 |
| 1245799 | 1620 | 1635 | 21435 | 21450 | AGTCGGTCACCTTTCA | 66 | 272 |
| 1245825 | 1713 | 1728 | 21528 | 21543 | AACATCTCTGGGACCA | 74 | 273 |
| 1245851 | 1775 | 1790 | 21590 | 21605 | GTAATAGCCAGTACAG | 77 | 274 |
| 1245877 | 2180 | 2195 | 21995 | 22010 | GTGGGAGTCGGATTAT | 37 | 275 |
| 1245903 | 2251 | 2266 | 22066 | 22081 | GAGGATAGTCCATGCA | 59 | 276 |
| 1245929 | N/A | N/A | 3437 | 3452 | GATAAGTAGATGGTAA | 59 | 277 |
| 1245955 | N/A | N/A | 3573 | 3588 | TTCTATCAACCTGCAC | 62 | 278 |
| 1245981 | N/A | N/A | 3964 | 3979 | AATACTAATGTCCAAG | 65 | 279 |
| 1246007 | N/A | N/A | 4572 | 4587 | ATATAGCCCTTTCCCC | 26 | 280 |
| 1246033 | N/A | N/A | 5081 | 5096 | CGCCTAAAGGAGATCT | 59 | 281 |
| 1246059 | N/A | N/A | 5241 | 5256 | GTTAGCAAAACACTTG | 71 | 282 |
| 1246085 | N/A | N/A | 5840 | 5855 | AAACATGGATGTTAGG | 56 | 283 |
| 1246111 | N/A | N/A | 6036 | 6051 | TATACTTTTCCGTCTC | 71 | 284 |
| 1246137 | N/A | N/A | 6305 | 6320 | TACTCTAGGAGATATA | 33 | 285 |
| 1246163 | N/A | N/A | 6478 | 6493 | CAACTATGTAATAGGC | 79 | 286 |
| 1246189 | N/A | N/A | 7684 | 7699 | AAGAAATTTGTGAACC | 21 | 287 |
| 1246215 | N/A | N/A | 7973 | 7988 | AGTTAATAGGACTAAA | 13 | 288 |
| 1246241 | N/A | N/A | 8246 | 8261 | AACCTAATAACTACAT | 0 | 289 |
| 1246267 | N/A | N/A | 8705 | 8720 | GACCAATATAATCCAA | 34 | 290 |
| 1246293 | N/A | N/A | 9009 | 9024 | GATTAAGGCAAAGATC | 25 | 291 |
| 1246319 | N/A | N/A | 9373 | 9388 | CTAGAACACTTGCCTC | 25 | 292 |
| 1246345 | N/A | N/A | 9540 | 9555 | GAATCCAGATCTGCCC | 29 | 293 |
| 1246371 | N/A | N/A | 9721 | 9736 | GAGGATAGTGAACATA | 50 | 294 |
| 1246397 | N/A | N/A | 9985 | 10000 | CTGTATTAAGACAGTT | 41 | 295 |
| 1246423 | N/A | N/A | 10336 | 10351 | TCCAAATCAGGTAGTT | 22 | 296 |
| 1246449 | N/A | N/A | 10833 | 10848 | GAGTAAACGACTCTGT | 43 | 297 |
| 1246475 | N/A | N/A | 11386 | 11401 | CTTTTAGTCAGGTAGA | 33 | 298 |
| 1246501 | N/A | N/A | 11780 | 11795 | GCTTAATGTTCAGTTT | 50 | 299 |
| 1246527 | N/A | N/A | 12009 | 12024 | AAGCATTGTTAGCTAA | 11 | 300 |
| 1246553 | N/A | N/A | 12465 | 12480 | ATTTATTTGCTGGTCC | 47 | 301 |
| 1246579 | N/A | N/A | 12647 | 12662 | TATACTAGGATTAGAA | 2 | 302 |
| 1246605 | N/A | N/A | 12778 | 12793 | AAATGAGGCGGCACTC | 20 | 303 |
| 1246631 | N/A | N/A | 13704 | 13719 | AATGTAAGAAGCCACG | 26 | 304 |
| 1246657 | N/A | N/A | 13881 | 13896 | CCCAAGAGTGGCAGGA | 29 | 305 |
| 1246683 | N/A | N/A | 14044 | 14059 | CATATCAATGCCTTAG | 29 | 306 |
| 1246709 | N/A | N/A | 14205 | 14220 | GCAGATTATTATGTGA | 59 | 307 |
| 1246735 | N/A | N/A | 14436 | 14451 | TTATACTGAAGGCTGT | 23 | 308 |
| 1246761 | N/A | N/A | 14916 | 14931 | ATACATTAGCAAGCTA | 69 | 309 |
| 1246787 | N/A | N/A | 15319 | 15334 | CTAGGATTAATCATGG | 65 | 310 |
| 1246813 | N/A | N/A | 15420 | 15435 | TCCAGTAGGTGTGTTT | 47 | 311 |
| 1246839 | N/A | N/A | 16116 | 16131 | CTCTATTGGGCCAGGC | 46 | 312 |
| 1246865 | N/A | N/A | 16461 | 16476 | GATATTATGTTCTTGG | 59 | 313 |
| 1246891 | N/A | N/A | 17909 | 17924 | GGAAATTGTTGCTGTT | 46 | 314 |
| 1246917 | N/A | N/A | 18097 | 18112 | GAAATTGATACACCAA | 67 | 315 |
| 1246943 | N/A | N/A | 18819 | 18834 | ATGCTAGTAATTGCAT | 16 | 316 |
| 1246969 | N/A | N/A | 19484 | 19499 | AGAATTAAGGGCTATA | 45 | 317 |
| 1246995 | N/A | N/A | 19689 | 19704 | GATGCTAAAAGCTCAC | 46 | 318 |
| 1247021 | N/A | N/A | 19908 | 19923 | TCTTAAGATACCCAGG | 58 | 319 |
| 1247047 | N/A | N/A | 20189 | 20204 | GTTATTAGAAGTCAGC | 56 | 320 |
| 1247073 | N/A | N/A | 20415 | 20430 | AATTATGCCTTGTGGC | 19 | 321 |

TABLE 5
Inhibition of HSD17B13 RNA by 3-10-3 cEt gapmers targeting SEQ ID NO: 1, and 2

| | SEQ | | SEQ | | | | |
|---|---|---|---|---|---|---|---|
| | ID | SEQ | ID | SEQ | | | |
| | NO: 1 | ID NO: | NO: 2 | ID NO: | | HSD17B13 | SEQ |
| Compound | Start | 1 Stop | Start | 2 Stop | Sequence | (% | ID |
| Number | Site | Site | Site | Site | (5′ to 3′) | Inhibition) | NO |
| 1245072 | 7 | 22 | 3101 | 3116 | TCCTAGGGAGGAGGTA | 33 | 322 |
| 1245098 | 64 | 79 | 3158 | 3173 | AGGATGATGTTCATGG | 88 | 323 |
| 1245124 | 115 | 130 | 3209 | 3224 | AACGACTCCAAGTAGG | 27 | 324 |
| 1245150 | 205 | 220 | 3299 | 3314 | GTCTGCCTGCCTATTC | 53 | 325 |
| 1245176 | 266 | 281 | N/A | N/A | ACCGCGCTTATTAATA | 4 | 326 |
| 1245202 | 303 | 318 | 7592 | 7607 | CGCCTAGTTTTCGGCA | 23 | 327 |
| 1245228 | 363 | 378 | 7652 | 7667 | TTAGAGAGCGATAGAT | 23 | 328 |
| 1245254 | 406 | 421 | 8800 | 8815 | TTCACCACGATTGTTA | 40 | 329 |
| 1245280 | 436 | 451 | 8830 | 8845 | AGATCGGCTGGATATA | 27 | 330 |
| 1245306 | 479 | 494 | 8873 | 8888 | GACCTCAAATGTCTTG | 12 | 331 |
| 1245332 | 526 | 541 | 10412 | 10427 | ATCGATGGAAGAAGTG | 39 | 332 |
| 1245358 | 573 | 588 | 10459 | 10474 | CGCACACTGAAGCCAC | 56 | 333 |
| 1245384 | 624 | 639 | 12042 | 12057 | CGGCAAATTTGCTGGA | 29 | 334 |
| 1245410 | 690 | 705 | 12108 | 12123 | AGGTTTTGATACCAGT | 60 | 335 |
| 1245436 | 763 | 778 | 15644 | 15659 | TCCAATACAGGCCATA | 62 | 336 |
| 1245462 | 795 | 810 | 15676 | 15691 | CATCTATCAGACTTCT | 38 | 337 |
| 1245488 | 846 | 861 | 15727 | 15742 | AGATATTGATATACGA | 20 | 338 |
| 1245514* | 911 | 926 | 20726 | 20741 | AATATTCTGCATACGA | 70 | 339 |
| 1245540* | 978 | 993 | 20793 | 20808 | ACATCTCTGGCTGGAG | 85 | 340 |
| 1245566 | 1018 | 1033 | 20833 | 20848 | GCAGCATTGATTCGAA | 63 | 341 |
| 1245592 | 1105 | 1120 | 20920 | 20935 | TAATTAATCTTGTTCG | 63 | 342 |
| 1245618 | 1264 | 1279 | 21079 | 21094 | GGGAGGTAGCTTTTGT | 10 | 343 |
| 1245644 | 1318 | 1333 | 21133 | 21148 | TGAACAGTCTTAAACC | 56 | 344 |
| 1245670 | 1345 | 1360 | 21160 | 21175 | GGCATGGCTACAGATT | 69 | 345 |
| 1245696 | 1389 | 1404 | 21204 | 21219 | TCTCTTAGCTGTGCAC | 79 | 346 |
| 1245722 | 1428 | 1443 | 21243 | 21258 | TATGTCCAGGTTGAGA | 64 | 347 |
| 1245748 | 1503 | 1518 | 21318 | 21333 | GAATAGAGTTGCACCG | 55 | 348 |
| 1245774 | 1562 | 1577 | 21377 | 21392 | GGTCCACTTTTGGTGG | 13 | 349 |
| 1245800 | 1621 | 1636 | 21436 | 21451 | GAGTCGGTCACCTTTC | 82 | 350 |
| 1245826 | 1715 | 1730 | 21530 | 21545 | TAAACATCTCTGGGAC | 51 | 351 |
| 1245841 | 1765 | 1780 | 21580 | 21595 | GTACAGTTCCTTTTCC | 58 | 38 |
| 1245852 | 1776 | 1791 | 21591 | 21606 | TGTAATAGCCAGTACA | 46 | 352 |
| 1245878 | 2181 | 2196 | 21996 | 22011 | AGTGGGAGTCGGATTA | 50 | 353 |
| 1245904 | 2252 | 2267 | 22067 | 22082 | AGAGGATAGTCCATGC | 74 | 354 |
| 1245930 | N/A | N/A | 3439 | 3454 | AAGATAAGTAGATGGT | 79 | 355 |
| 1245956 | N/A | N/A | 3602 | 3617 | AGCTTGGAAGGAGACT | 69 | 356 |
| 1245982 | N/A | N/A | 3999 | 4014 | GTTAATGTAGTGTTTA | 77 | 357 |
| 1246008 | N/A | N/A | 4573 | 4588 | AATATAGCCCTTTCCC | 44 | 358 |
| 1246034 | N/A | N/A | 5082 | 5097 | TCGCCTAAAGGAGATC | 70 | 359 |
| 1246060 | N/A | N/A | 5267 | 5282 | TGCAAAATGTGATGCC | 69 | 360 |
| 1246065 | N/A | N/A | 5659 | 5674 | ATAAGTTACCAGAGCA | 90 | 48 |
| 1246086 | N/A | N/A | 5841 | 5856 | CAAACATGGATGTTAG | 49 | 361 |
| 1246112 | N/A | N/A | 6037 | 6052 | TTATACTTTTCCGTCT | 61 | 362 |
| 1246138 | N/A | N/A | 6323 | 6338 | ATAGGGAGACCATGCT | 64 | 363 |
| 1246164 | N/A | N/A | 6567 | 6582 | AAAACATTGCTCTTCG | 59 | 364 |
| 1246190 | N/A | N/A | 7751 | 7766 | TAAATCAGGCAGTCAT | 35 | 365 |
| 1246216 | N/A | N/A | 7974 | 7989 | AAGTTAATAGGACTAA | 17 | 366 |
| 1246242 | N/A | N/A | 8248 | 8263 | ATAACCTAATAACTAC | 26 | 367 |
| 1246268 | N/A | N/A | 8714 | 8729 | AAGTTTTGGGACCAAT | 11 | 368 |
| 1246294 | N/A | N/A | 9012 | 9027 | CTTGATTAAGGCAAAG | 38 | 369 |
| 1246320 | N/A | N/A | 9375 | 9390 | ATCTAGAACACTTGCC | 27 | 370 |
| 1246346 | N/A | N/A | 9588 | 9603 | CTGGTAAAGGTAAGGG | 58 | 371 |
| 1246372 | N/A | N/A | 9722 | 9737 | AGAGGATAGTGAACAT | 59 | 372 |
| 1246398 | N/A | N/A | 9986 | 10001 | ACTGTATTAAGACAGT | 20 | 373 |
| 1246424 | N/A | N/A | 10337 | 10352 | TTCCAAATCAGGTAGT | 12 | 374 |
| 1246450 | N/A | N/A | 10834 | 10849 | TGAGTAAACGACTCTG | 23 | 375 |
| 1246476 | N/A | N/A | 11387 | 11402 | ACTTTTAGTCAGGTAG | 26 | 376 |
| 1246502 | N/A | N/A | 11781 | 11796 | GGCTTAATGTTCAGTT | 54 | 377 |
| 1246528 | N/A | N/A | 12011 | 12026 | TTAAGCATTGTTAGCT | 16 | 378 |
| 1246554 | N/A | N/A | 12466 | 12481 | AATTTATTTGCTGGTC | 27 | 379 |
| 1246580 | N/A | N/A | 12648 | 12663 | ATATACTAGGATTAGA | 33 | 380 |
| 1246606 | N/A | N/A | 12779 | 12794 | CAAATGAGGCGGCACT | 32 | 381 |
| 1246632 | N/A | N/A | 13707 | 13722 | GCAAATGTAAGAAGCC | 4 | 382 |
| 1246658 | N/A | N/A | 13894 | 13909 | CTATCATGCCTTCCCC | 1 | 383 |
| 1246684 | N/A | N/A | 14046 | 14061 | TACATATCAATGCCTT | 38 | 384 |
| 1246710 | N/A | N/A | 14206 | 14221 | TGCAGATTATTATGTG | 38 | 385 |
| 1246736 | N/A | N/A | 14437 | 14452 | CTTATACTGAAGGCTG | 48 | 386 |
| 1246762 | N/A | N/A | 14934 | 14949 | CATTATAAGCTAACTA | 39 | 387 |
| 1246788 | N/A | N/A | 15321 | 15336 | GGCTAGGATTAATCAT | 44 | 388 |
| 1246814 | N/A | N/A | 15421 | 15436 | ATCCAGTAGGTGTGTT | 41 | 389 |
| 1246840 | N/A | N/A | 16123 | 16138 | ATAATAGCTCTATTGG | 46 | 390 |
| 1246866 | N/A | N/A | 16533 | 16548 | CAAGACTTAAACACCA | 55 | 391 |
| 1246892 | N/A | N/A | 17910 | 17925 | GGGAAATTGTTGCTGT | 42 | 392 |
| 1246918 | N/A | N/A | 18099 | 18114 | CTGAAATTGATACACC | 67 | 393 |
| 1246944 | N/A | N/A | 18827 | 18842 | AAACCTTCATGCTAGT | 27 | 394 |
| 1246970 | N/A | N/A | 19485 | 19500 | TAGAATTAAGGGCTAT | 31 | 395 |
| 1246996 | N/A | N/A | 19699 | 19714 | GATTAATCTTGATGCT | 26 | 396 |
| 1247022 | N/A | N/A | 19909 | 19924 | ATCTTAAGATACCCAG | 70 | 397 |
| 1247048 | N/A | N/A | 20192 | 20207 | GCAGTTATTAGAAGTC | 76 | 398 |
| 1247074 | N/A | N/A | 20419 | 20434 | GTAAAATTATGCCTTG | 50 | 399 |

TABLE 6
Inhibition of HSD17B13 RNA by 3-10-3 cEt gapmers targeting SEQ ID NO: 1, and 2

| | SEQ | | SEQ | | | | |
|---|---|---|---|---|---|---|---|
| | ID | SEQ | ID | SEQ | | | |
| | NO: 1 | ID NO: | NO: 2 | ID NO: | | HSD17B13 | SEQ |
| Compound | Start | 1 Stop | Start | 2 Stop | Sequence | (% | ID |
| Number | Site | Site | Site | Site | (5′ to 3′) | Inhibition) | NO |
| 1245073 | 8 | 23 | 3102 | 3117 | GTCCTAGGGAGGAGGT | 36 | 400 |
| 1245099 | 65 | 80 | 3159 | 3174 | TAGGATGATGTTCATG | 72 | 401 |
| 1245125 | 116 | 131 | 3210 | 3225 | CAACGACTCCAAGTAG | 0 | 402 |
| 1245151 | 206 | 221 | 3300 | 3315 | AGTCTGCCTGCCTATT | 47 | 403 |
| 1245177 | 267 | 282 | N/A | N/A | CACCGCGCTTATTAAT | 7 | 404 |
| 1245203 | 304 | 319 | 7593 | 7608 | ACGCCTAGTTTTCGGC | 7 | 405 |
| 1245229 | 364 | 379 | 7653 | 7668 | TTTAGAGAGCGATAGA | 13 | 406 |
| 1245255 | 407 | 422 | 8801 | 8816 | ATTCACCACGATTGTT | 0 | 407 |
| 1245281 | 437 | 452 | 8831 | 8846 | AAGATCGGCTGGATAT | 1 | 408 |
| 1245307 | 481 | 496 | 8875 | 8890 | TTGACCTCAAATGTCT | 0 | 409 |
| 1245333 | 527 | 542 | 10413 | 10428 | CATCGATGGAAGAAGT | 16 | 410 |
| 1245359 | 574 | 589 | 10460 | 10475 | CCGCACACTGAAGCCA | 34 | 411 |
| 1245385 | 625 | 640 | 12043 | 12058 | GCGGCAAATTTGCTGG | 0 | 412 |
| 1245411 | 691 | 706 | 12109 | 12124 | GAGGTTTTGATACCAG | 59 | 413 |
| 1245437 | 764 | 779 | 15645 | 15660 | CTCCAATACAGGCCAT | 20 | 414 |
| 1245463 | 796 | 811 | 15677 | 15692 | CCATCTATCAGACTTC | 78 | 415 |
| 1245489 | 847 | 862 | 15728 | 15743 | AAGATATTGATATACG | 45 | 416 |
| 1245515* | 912 | 927 | 20727 | 20742 | GAATATTCTGCATACG | 68 | 417 |
| 1245541* | 979 | 994 | 20794 | 20809 | TACATCTCTGGCTGGA | 86 | 418 |
| 1245567 | 1019 | 1034 | 20834 | 20849 | TGCAGCATTGATTCGA | 47 | 419 |
| 1245593 | 1106 | 1121 | 20921 | 20936 | GTAATTAATCTTGTTC | 52 | 420 |
| 1245619 | 1265 | 1280 | 21080 | 21095 | AGGGAGGTAGCTTTTG | 46 | 421 |
| 1245645 | 1319 | 1334 | 21134 | 21149 | TTGAACAGTCTTAAAC | 33 | 422 |
| 1245671 | 1346 | 1361 | 21161 | 21176 | TGGCATGGCTACAGAT | 57 | 423 |
| 1245697 | 1390 | 1405 | 21205 | 21220 | ATCTCTTAGCTGTGCA | 63 | 424 |
| 1245723 | 1429 | 1444 | 21244 | 21259 | ATATGTCCAGGTTGAG | 61 | 425 |
| 1245749 | 1504 | 1519 | 21319 | 21334 | AGAATAGAGTTGCACC | 70 | 426 |
| 1245775 | 1563 | 1578 | 21378 | 21393 | GGGTCCACTTTTGGTG | 13 | 427 |
| 1245801 | 1622 | 1637 | 21437 | 21452 | AGAGTCGGTCACCTTT | 71 | 428 |
| 1245827 | 1718 | 1733 | 21533 | 21548 | GTCTAAACATCTCTGG | 58 | 429 |
| 1245841 | 1765 | 1780 | 21580 | 21595 | GTACAGTTCCTTTTCC | 57 | 38 |
| 1245853 | 1777 | 1792 | 21592 | 21607 | ATGTAATAGCCAGTAC | 52 | 430 |
| 1245879 | 2182 | 2197 | 21997 | 22012 | TAGTGGGAGTCGGATT | 54 | 431 |
| 1245905 | 2253 | 2268 | 22068 | 22083 | AAGAGGATAGTCCATG | 65 | 432 |
| 1245931 | N/A | N/A | 3474 | 3489 | AGGGAATTTATCAAAC | 47 | 433 |
| 1245957 | N/A | N/A | 3610 | 3625 | CATTTAGCAGCTTGGA | 88 | 434 |
| 1245983 | N/A | N/A | 4002 | 4017 | GTTGTTAATGTAGTGT | 77 | 435 |
| 1246009 | N/A | N/A | 4641 | 4656 | ATACGACTTCCTTCTA | 44 | 436 |
| 1246035 | N/A | N/A | 5104 | 5119 | GAAAACTCAGCCAGCA | 78 | 437 |
| 1246061 | N/A | N/A | 5278 | 5293 | AGCTAGACAATTGCAA | 30 | 438 |
| 1246065 | N/A | N/A | 5659 | 5674 | ATAAGTTACCAGAGCA | 87 | 48 |
| 1246087 | N/A | N/A | 5842 | 5857 | CCAAACATGGATGTTA | 43 | 439 |
| 1246113 | N/A | N/A | 6038 | 6053 | ATTATACTTTTCCGTC | 75 | 440 |
| 1246139 | N/A | N/A | 6327 | 6342 | TTTCATAGGGAGACCA | 71 | 441 |
| 1246165 | N/A | N/A | 6607 | 6622 | CTAAAGCAGGCTACTT | 32 | 442 |
| 1246191 | N/A | N/A | 7752 | 7767 | TTAAATCAGGCAGTCA | 45 | 443 |
| 1246217 | N/A | N/A | 7975 | 7990 | AAAGTTAATAGGACTA | 12 | 444 |
| 1246243 | N/A | N/A | 8249 | 8264 | CATAACCTAATAACTA | 10 | 445 |
| 1246269 | N/A | N/A | 8717 | 8732 | TCAAAGTTTTGGGACC | 42 | 446 |
| 1246295 | N/A | N/A | 9080 | 9095 | TCCACTTGAATTCTGT | 32 | 447 |
| 1246321 | N/A | N/A | 9376 | 9391 | GATCTAGAACACTTGC | 27 | 448 |
| 1246347 | N/A | N/A | 9589 | 9604 | GCTGGTAAAGGTAAGG | 65 | 449 |
| 1246373 | N/A | N/A | 9751 | 9766 | CTCCAAATTCCCAACC | 31 | 450 |
| 1246399 | N/A | N/A | 9998 | 10013 | AAATCTTGTGTAACTG | 41 | 451 |
| 1246425 | N/A | N/A | 10359 | 10374 | GACAATGACATAGACG | 0 | 452 |
| 1246451 | N/A | N/A | 10835 | 10850 | CTGAGTAAACGACTCT | 33 | 453 |
| 1246477 | N/A | N/A | 11389 | 11404 | CAACTTTTAGTCAGGT | 66 | 454 |
| 1246503 | N/A | N/A | 11782 | 11797 | TGGCTTAATGTTCAGT | 50 | 455 |
| 1246529 | N/A | N/A | 12012 | 12027 | ATTAAGCATTGTTAGC | 0 | 456 |
| 1246555 | N/A | N/A | 12467 | 12482 | CAATTTATTTGCTGGT | 31 | 457 |
| 1246581 | N/A | N/A | 12649 | 12664 | TATATACTAGGATTAG | 10 | 458 |
| 1246607 | N/A | N/A | 12781 | 12796 | CTCAAATGAGGCGGCA | 56 | 459 |
| 1246633 | N/A | N/A | 13711 | 13726 | CGTAGCAAATGTAAGA | 0 | 460 |
| 1246659 | N/A | N/A | 13896 | 13911 | ATCTATCATGCCTTCC | 6 | 461 |
| 1246685 | N/A | N/A | 14047 | 14062 | TTACATATCAATGCCT | 12 | 462 |
| 1246711 | N/A | N/A | 14243 | 14258 | GTTAAAACTTCATTCC | 5 | 463 |
| 1246737 | N/A | N/A | 14438 | 14453 | CCTTATACTGAAGGCT | 41 | 464 |
| 1246763 | N/A | N/A | 14935 | 14950 | TCATTATAAGCTAACT | 0 | 465 |
| 1246789 | N/A | N/A | 15328 | 15343 | GAGGAATGGCTAGGAT | 47 | 466 |
| 1246815 | N/A | N/A | 15424 | 15439 | CATATCCAGTAGGTGT | 37 | 467 |
| 1246841 | N/A | N/A | 16128 | 16143 | CCATAATAATAGCTCT | 48 | 468 |
| 1246867 | N/A | N/A | 16755 | 16770 | AAAGTTAGTTGGGCGA | 26 | 469 |
| 1246893 | N/A | N/A | 17911 | 17926 | TGGGAAATTGTTGCTG | 38 | 470 |
| 1246919 | N/A | N/A | 18100 | 18115 | ACTGAAATTGATACAC | 49 | 471 |
| 1246945 | N/A | N/A | 18828 | 18843 | GAAACCTTCATGCTAG | 31 | 472 |
| 1246971 | N/A | N/A | 19486 | 19501 | CTAGAATTAAGGGCTA | 42 | 473 |
| 1246997 | N/A | N/A | 19700 | 19715 | TGATTAATCTTGATGC | 15 | 474 |
| 1247023 | N/A | N/A | 19910 | 19925 | CATCTTAAGATACCCA | 76 | 475 |
| 1247049 | N/A | N/A | 20248 | 20263 | CCTAAACAAACACTAT | 8 | 476 |
| 1247075 | N/A | N/A | 20422 | 20437 | ACAGTAAAATTATGCC | 73 | 477 |

TABLE 7
Inhibition of HSD17B13 RNA by 3-10-3 cEt gapmers
targeting SEQ ID NO: 1, and 2

| | SEQ | | SEQ | | | | |
|---|---|---|---|---|---|---|---|
| | ID | SEQ | ID | SEQ | | | |
| | NO: 1 | ID NO: | NO: 2 | ID NO: | | HSD17B13 | SEQ |
| Compound | Start | 1 Stop | Start | 2 Stop | | (% | ID |
| Number | Site | Site | Site | Site | Sequence (5′ to 3′) | Inhibition) | NO |
| 1245074 | 10 | 25 | 3104 | 3119 | TAGTCCTAGGGAGGAG | 68 | 478 |
| 1245100 | 66 | 81 | 3160 | 3175 | CTAGGATGATGTTCAT | 47 | 479 |
| 1245126 | 117 | 132 | 3211 | 3226 | CCAACGACTCCAAGTA | 20 | 480 |
| 1245152 | 207 | 222 | 3301 | 3316 | TAGTCTGCCTGCCTAT | 44 | 481 |
| 1245178 | 268 | 283 | N/A | N/A | ACACCGCGCTTATTAA | 7 | 482 |
| 1245204 | 316 | 331 | 7605 | 7620 | GCATGCGCAGTGACGC | 36 | 483 |
| 1245230 | 365 | 380 | 7654 | 7669 | ATTTAGAGAGCGATAG | 14 | 484 |
| 1245256 | 408 | 423 | 8802 | 8817 | TATTCACCACGATTGT | 2 | 485 |
| 1245282 | 438 | 453 | 8832 | 8847 | GAAGATCGGCTGGATA | 16 | 486 |
| 1245308 | 482 | 497 | 8876 | 8891 | GTTGACCTCAAATGTC | 0 | 487 |
| 1245334 | 528 | 543 | 10414 | 10429 | TCATCGATGGAAGAAG | 24 | 488 |
| 1245360 | 575 | 590 | 10461 | 10476 | GCCGCACACTGAAGCC | 25 | 489 |
| 1245386 | 626 | 641 | 12044 | 12059 | AGCGGCAAATTTGCTG | 5 | 490 |
| 1245412 | 692 | 707 | 12110 | 12125 | TGAGGTTTTGATACCA | 63 | 491 |
| 1245438 | 765 | 780 | 15646 | 15661 | TCTCCAATACAGGCCA | 21 | 492 |
| 1245464 | 797 | 812 | 15678 | 15693 | TCCATCTATCAGACTT | 42 | 493 |
| 1245490* | 858 | 873 | 15739 | 15754 | GTAGTCTCAGAAAGAT | 45 | 494 |
| 1245516* | 926 | 941 | 20741 | 20756 | CACTGCTTCAAATTGA | 64 | 495 |
| 1245542* | 980 | 995 | 20795 | 20810 | ATACATCTCTGGCTGG | 88 | 496 |
| 1245568 | 1020 | 1035 | 20835 | 20850 | TTGCAGCATTGATTCG | 59 | 497 |
| 1245594 | 1107 | 1122 | 20922 | 20937 | GGTAATTAATCTTGTT | 58 | 498 |
| 1245620 | 1266 | 1281 | 21081 | 21096 | TAGGGAGGTAGCTTTT | 46 | 499 |
| 1245646 | 1320 | 1335 | 21135 | 21150 | CTTGAACAGTCTTAAA | 39 | 500 |
| 1245672 | 1347 | 1362 | 21162 | 21177 | GTGGCATGGCTACAGA | 56 | 501 |
| 1245698 | 1391 | 1406 | 21206 | 21221 | GATCTCTTAGCTGTGC | 64 | 502 |
| 1245724 | 1430 | 1445 | 21245 | 21260 | AATATGTCCAGGTTGA | 64 | 503 |
| 1245750 | 1505 | 1520 | 21320 | 21335 | CAGAATAGAGTTGCAC | 50 | 504 |
| 1245776 | 1564 | 1579 | 21379 | 21394 | AGGGTCCACTTTTGGT | 11 | 505 |
| 1245802 | 1623 | 1638 | 21438 | 21453 | TAGAGTCGGTCACCTT | 65 | 506 |
| 1245828 | 1719 | 1734 | 21534 | 21549 | TGTCTAAACATCTCTG | 58 | 507 |
| 1245841 | 1765 | 1780 | 21580 | 21595 | GTACAGTTCCTTTTCC | 51 | 38 |
| 1245854 | 1778 | 1793 | 21593 | 21608 | TATGTAATAGCCAGTA | 50 | 508 |
| 1245880 | 2183 | 2198 | 21998 | 22013 | GTAGTGGGAGTCGGAT | 48 | 509 |
| 1245906 | 2254 | 2269 | 22069 | 22084 | CAAGAGGATAGTCCAT | 58 | 510 |
| 1245932 | N/A | N/A | 3487 | 3502 | AGACTAAGGGACCAGG | 80 | 511 |
| 1245958 | N/A | N/A | 3611 | 3626 | TCATTTAGCAGCTTGG | 79 | 512 |
| 1245984 | N/A | N/A | 4123 | 4138 | ACAATTTTTCCAATCC | 86 | 513 |
| 1246010 | N/A | N/A | 4642 | 4657 | AATACGACTTCCTTCT | 26 | 514 |
| 1246036 | N/A | N/A | 5105 | 5120 | TGAAAACTCAGCCAGC | 77 | 515 |
| 1246062 | N/A | N/A | 5287 | 5302 | TTATAACTGAGCTAGA | 8 | 516 |
| 1246065 | N/A | N/A | 5659 | 5674 | ATAAGTTACCAGAGCA | 89 | 48 |
| 1246088 | N/A | N/A | 5843 | 5858 | CCCAAACATGGATGTT | 72 | 517 |
| 1246114 | N/A | N/A | 6039 | 6054 | AATTATACTTTTCCGT | 66 | 518 |
| 1246140 | N/A | N/A | 6328 | 6343 | CTTTCATAGGGAGACC | 73 | 519 |
| 1246166 | N/A | N/A | 6608 | 6623 | TCTAAAGCAGGCTACT | 32 | 520 |
| 1246192 | N/A | N/A | 7757 | 7772 | CCAATTTAAATCAGGC | 73 | 521 |
| 1246218 | N/A | N/A | 7976 | 7991 | CAAAGTTAATAGGACT | 50 | 522 |
| 1246244 | N/A | N/A | 8280 | 8295 | GTCTAAAGTGCTGGTT | 39 | 523 |
| 1246270 | N/A | N/A | 8747 | 8762 | GAACACTTTCACTGGG | 0 | 524 |
| 1246296 | N/A | N/A | 9110 | 9125 | ACCAAGTAGCTTACAT | 2 | 525 |
| 1246322 | N/A | N/A | 9377 | 9392 | GGATCTAGAACACTTG | 32 | 526 |
| 1246348 | N/A | N/A | 9598 | 9613 | ATGTGAAGAGCTGGTA | 42 | 527 |
| 1246374 | N/A | N/A | 9761 | 9776 | CCCAAGCTACCTCCAA | 15 | 528 |
| 1246400 | N/A | N/A | 10001 | 10016 | GTGAAATCTTGTGTAA | 44 | 529 |
| 1246426 | N/A | N/A | 10360 | 10375 | AGACAATGACATAGAC | 14 | 530 |
| 1246452 | N/A | N/A | 10836 | 10851 | ACTGAGTAAACGACTC | 45 | 531 |
| 1246478 | N/A | N/A | 11428 | 11443 | CCCTTTATGTCTTTGG | 35 | 532 |
| 1246504 | N/A | N/A | 11790 | 11805 | CTATTGATTGGCTTAA | 31 | 533 |
| 1246530 | N/A | N/A | 12038 | 12053 | AAATTTGCTGGAACTG | 15 | 534 |
| 1246556 | N/A | N/A | 12478 | 12493 | AGCTAGATACTCAATT | 2 | 535 |
| 1246582 | N/A | N/A | 12652 | 12667 | GAATATATACTAGGAT | 5 | 536 |
| 1246608 | N/A | N/A | 12782 | 12797 | CCTCAAATGAGGCGGC | 47 | 537 |
| 1246634 | N/A | N/A | 13730 | 13745 | ATTAAGTACTGTGAGA | 1 | 538 |
| 1246660 | N/A | N/A | 13897 | 13912 | CATCTATCATGCCTTC | 18 | 539 |
| 1246686 | N/A | N/A | 14048 | 14063 | ATTACATATCAATGCC | 36 | 540 |
| 1246712 | N/A | N/A | 14250 | 14265 | AGCGAATGTTAAAACT | 16 | 541 |
| 1246738 | N/A | N/A | 14439 | 14454 | TCCTTATACTGAAGGC | 22 | 542 |
| 1246764 | N/A | N/A | 14936 | 14951 | CTCATTATAAGCTAAC | 13 | 543 |
| 1246790 | N/A | N/A | 15350 | 15365 | AGTAGTGGAGCCAGAC | 39 | 544 |
| 1246816 | N/A | N/A | 15425 | 15440 | TCATATCCAGTAGGTG | 32 | 545 |
| 1246842 | N/A | N/A | 16129 | 16144 | TCCATAATAATAGCTC | 69 | 546 |
| 1246868 | N/A | N/A | 16905 | 16920 | CGTCAAAAACCGTCAA | 20 | 547 |
| 1246894 | N/A | N/A | 17923 | 17938 | GAGTATTTCCTCTGGG | 23 | 548 |
| 1246920 | N/A | N/A | 18506 | 18521 | ACTAATTTAGTCAACT | 18 | 549 |
| 1246946 | N/A | N/A | 18846 | 18861 | TTTAACTACCCTCACA | 0 | 550 |
| 1246972 | N/A | N/A | 19487 | 19502 | TCTAGAATTAAGGGCT | 45 | 551 |
| 1246998 | N/A | N/A | 19701 | 19716 | CTGATTAATCTTGATG | 32 | 552 |
| 1247024 | N/A | N/A | 19911 | 19926 | GCATCTTAAGATACCC | 82 | 553 |
| 1247050 | N/A | N/A | 20249 | 20264 | GCCTAAACAAACACTA | 37 | 554 |
| 1247076 | N/A | N/A | 20481 | 20496 | CATAGTGGACTTCATT | 34 | 555 |

TABLE 8
Inhibition of HSD17B13 RNA by 3-10-3 cEt
gapmers targeting SEQ ID NO: 1, and 2

| | SEQ | | SEQ | | | | |
|---|---|---|---|---|---|---|---|
| | ID | SEQ | ID | SEQ | | | |
| | NO: 1 | ID NO: | NO: 2 | ID NO: | | HSD17B13 | SEQ |
| Compound | Start | 1 Stop | Start | 2 Stop | | (% | ID |
| Number | Site | Site | Site | Site | Sequence (5′ to 3′) | Inhibition) | NO |
| 1245075 | 11 | 26 | 3105 | 3120 | GTAGTCCTAGGGAGGA | 77 | 556 |
| 1245101 | 67 | 82 | 3161 | 3176 | TCTAGGATGATGTTCA | 64 | 557 |
| 1245127 | 118 | 133 | 3212 | 3227 | ACCAACGACTCCAAGT | 16 | 558 |
| 1245153 | 208 | 223 | 3302 | 3317 | GTAGTCTGCCTGCCTA | 68 | 559 |
| 1245179 | 269 | 284 | N/A | N/A | CACACCGCGCTTATTA | 11 | 560 |
| 1245205 | 317 | 332 | 7606 | 7621 | CGCATGCGCAGTGACG | 46 | 561 |
| 1245231 | 366 | 381 | 7655 | 7670 | GATTTAGAGAGCGATA | 44 | 562 |
| 1245257 | 409 | 424 | 8803 | 8818 | TTATTCACCACGATTG | 40 | 563 |
| 1245283 | 439 | 454 | 8833 | 8848 | AGAAGATCGGCTGGAT | 29 | 564 |
| 1245309 | 483 | 498 | 8877 | 8892 | TGTTGACCTCAAATGT | 14 | 565 |
| 1245335 | 529 | 544 | 10415 | 10430 | ATCATCGATGGAAGAA | 30 | 566 |
| 1245361 | 576 | 591 | 10462 | 10477 | GGCCGCACACTGAAGC | 9 | 567 |
| 1245387 | 632 | 647 | 12050 | 12065 | GCCAACAGCGGCAAAT | 30 | 568 |
| 1245413 | 693 | 708 | 12111 | 12126 | ATGAGGTTTTGATACC | 47 | 569 |
| 1245439 | 766 | 781 | 15647 | 15662 | GTCTCCAATACAGGCC | 47 | 570 |
| 1245465 | 798 | 813 | 15679 | 15694 | TTCCATCTATCAGACT | 33 | 571 |
| 1245491* | 866 | 881 | N/A | N/A | AAACTTCTGTAGTCTC | 67 | 572 |
| 1245517* | 927 | 942 | 20742 | 20757 | CCACTGCTTCAAATTG | 77 | 573 |
| 1245543* | 981 | 996 | 20796 | 20811 | CATACATCTCTGGCTG | 69 | 574 |
| 1245569 | 1021 | 1036 | 20836 | 20851 | TTTGCAGCATTGATTC | 53 | 575 |
| 1245595 | 1109 | 1124 | 20924 | 20939 | CAGGTAATTAATCTTG | 54 | 576 |
| 1245621 | 1267 | 1282 | 21082 | 21097 | TTAGGGAGGTAGCTTT | 54 | 577 |
| 1245647 | 1321 | 1336 | 21136 | 21151 | ACTTGAACAGTCTTAA | 63 | 578 |
| 1245673 | 1348 | 1363 | 21163 | 21178 | TGTGGCATGGCTACAG | 24 | 579 |
| 1245699 | 1392 | 1407 | 21207 | 21222 | TGATCTCTTAGCTGTG | 59 | 580 |
| 1245725 | 1431 | 1446 | 21246 | 21261 | AAATATGTCCAGGTTG | 68 | 581 |
| 1245751 | 1506 | 1521 | 21321 | 21336 | CCAGAATAGAGTTGCA | 62 | 582 |
| 1245777 | 1565 | 1580 | 21380 | 21395 | GAGGGTCCACTTTTGG | 23 | 583 |
| 1245803 | 1624 | 1639 | 21439 | 21454 | ATAGAGTCGGTCACCT | 60 | 584 |
| 1245829 | 1721 | 1736 | 21536 | 21551 | ATTGTCTAAACATCTC | 84 | 585 |
| 1245855 | 1779 | 1794 | 21594 | 21609 | TTATGTAATAGCCAGT | 77 | 586 |
| 1245881 | 2184 | 2199 | 21999 | 22014 | TGTAGTGGGAGTCGGA | 62 | 587 |
| 1245907 | 2255 | 2270 | 22070 | 22085 | ACAAGAGGATAGTCCA | 64 | 588 |
| 1245933 | N/A | N/A | 3488 | 3503 | CAGACTAAGGGACCAG | 75 | 589 |
| 1245959 | N/A | N/A | 3612 | 3627 | CTCATTTAGCAGCTTG | 70 | 590 |
| 1245985 | N/A | N/A | 4136 | 4151 | CAAGGAGTACTTCACA | 66 | 591 |
| 1246011 | N/A | N/A | 4643 | 4658 | TAATACGACTTCCTTC | 32 | 592 |
| 1246037 | N/A | N/A | 5125 | 5140 | GCAAAAGGAGCCAGTT | 57 | 593 |
| 1246063 | N/A | N/A | 5290 | 5305 | GTTTTATAACTGAGCT | 84 | 594 |
| 1246089 | N/A | N/A | 5871 | 5886 | CTAAACCCTGGAGCAG | 42 | 595 |
| 1246115 | N/A | N/A | 6040 | 6055 | AAATTATACTTTTCCG | 85 | 596 |
| 1246141 | N/A | N/A | 6337 | 6352 | GAAGAAGGACTTTCAT | 40 | 597 |
| 1246167 | N/A | N/A | 6609 | 6624 | CTCTAAAGCAGGCTAC | 51 | 598 |
| 1246193 | N/A | N/A | 7758 | 7773 | TCCAATTTAAATCAGG | 61 | 599 |
| 1246219 | N/A | N/A | 7977 | 7992 | GCAAAGTTAATAGGAC | 52 | 600 |
| 1246245 | N/A | N/A | 8282 | 8297 | TGGTCTAAAGTGCTGG | 61 | 601 |
| 1246271 | N/A | N/A | 8895 | 8910 | CCCAAAAATGTCCTAG | 18 | 602 |
| 1246297 | N/A | N/A | 9111 | 9126 | GACCAAGTAGCTTACA | 28 | 603 |
| 1246323 | N/A | N/A | 9379 | 9394 | ATGGATCTAGAACACT | 43 | 604 |
| 1246349 | N/A | N/A | 9600 | 9615 | ATATGTGAAGAGCTGG | 51 | 605 |
| 1246375 | N/A | N/A | 9762 | 9777 | ACCCAAGCTACCTCCA | 9 | 606 |
| 1246401 | N/A | N/A | 10002 | 10017 | AGTGAAATCTTGTGTA | 41 | 607 |
| 1246427 | N/A | N/A | 10380 | 10395 | GATCATTGCAGAAAGA | 23 | 608 |
| 1246453 | N/A | N/A | 10849 | 10864 | ACATATGGTGTACACT | 19 | 609 |
| 1246479 | N/A | N/A | 11468 | 11483 | GCAAATACAGCAGTAC | 56 | 610 |
| 1246505 | N/A | N/A | 11791 | 11806 | TCTATTGATTGGCTTA | 39 | 611 |
| 1246531 | N/A | N/A | 12039 | 12054 | CAAATTTGCTGGAACT | 39 | 612 |
| 1246557 | N/A | N/A | 12482 | 12497 | AAGGAGCTAGATACTC | 19 | 613 |
| 1246583 | N/A | N/A | 12654 | 12669 | CAGAATATATACTAGG | 55 | 614 |
| 1246609 | N/A | N/A | 12795 | 12810 | TAAGAGTCAGTATCCT | 52 | 615 |
| 1246635 | N/A | N/A | 13731 | 13746 | TATTAAGTACTGTGAG | 0 | 616 |
| 1246661 | N/A | N/A | 13915 | 13930 | CATTATCCTTACTCCC | 16 | 617 |
| 1246687 | N/A | N/A | 14049 | 14064 | CATTACATATCAATGC | 29 | 618 |
| 1246713 | N/A | N/A | 14262 | 14277 | AGTTAGGGAGCCAGCG | 38 | 619 |
| 1246739 | N/A | N/A | 14465 | 14480 | CTGGAGGTATGTCATA | 23 | 620 |
| 1246765 | N/A | N/A | 15022 | 15037 | TGATAAAATAGGGTGC | 44 | 621 |
| 1246791 | N/A | N/A | 15351 | 15366 | GAGTAGTGGAGCCAGA | 44 | 622 |
| 1246817 | N/A | N/A | 15427 | 15442 | TTTCATATCCAGTAGG | 36 | 623 |
| 1246843 | N/A | N/A | 16189 | 16204 | AATAACTGTTCTCCCC | 20 | 624 |
| 1246869 | N/A | N/A | 16956 | 16971 | GACAACAAACAATGGG | 39 | 625 |
| 1246895 | N/A | N/A | 17924 | 17939 | AGAGTATTTCCTCTGG | 32 | 626 |
| 1246921 | N/A | N/A | 18507 | 18522 | CACTAATTTAGTCAAC | 7 | 627 |
| 1246947 | N/A | N/A | 18847 | 18862 | TTTTAACTACCCTCAC | 2 | 628 |
| 1246973 | N/A | N/A | 19488 | 19503 | ATCTAGAATTAAGGGC | 41 | 629 |
| 1246999 | N/A | N/A | 19702 | 19717 | GCTGATTAATCTTGAT | 48 | 630 |
| 1247025 | N/A | N/A | 19921 | 19936 | TCCAAGGAGTGCATCT | 46 | 631 |
| 1247051 | N/A | N/A | 20356 | 20371 | TTATTGCCTGAACACA | 58 | 632 |
| 1247077 | N/A | N/A | 20482 | 20497 | TCATAGTGGACTTCAT | 36 | 633 |

TABLE 9
Inhibition of HSD17B13 RNA by 3-10-3 cEt
gapmers targeting SEQ ID NO: 1, and 2

| | SEQ | | SEQ | | | | |
|---|---|---|---|---|---|---|---|
| | ID | SEQ | ID | SEQ | | | |
| | NO: 1 | ID NO: | NO: 2 | ID NO: | | HSD17B13 | SEQ |
| Compound | Start | 1 Stop | Start | 2 Stop | | (% | ID |
| Number | Site | Site | Site | Site | Sequence (5′ to 3′) | Inhibition) | NO |
| 1245076 | 12 | 27 | 3106 | 3121 | TGTAGTCCTAGGGAGG | 86 | 634 |
| 1245102 | 68 | 83 | 3162 | 3177 | TTCTAGGATGATGTTC | 72 | 635 |
| 1245128 | 119 | 134 | 3213 | 3228 | CACCAACGACTCCAAG | 16 | 636 |
| 1245154 | 211 | 226 | 3305 | 3320 | TAAGTAGTCTGCCTGC | 19 | 637 |
| 1245180 | 271 | 286 | N/A | N/A | TCCACACCGCGCTTAT | 32 | 638 |
| 1245206 | 318 | 333 | 7607 | 7622 | ACGCATGCGCAGTGAC | 52 | 639 |
| 1245232 | 367 | 382 | 7656 | 7671 | TGATTTAGAGAGCGAT | 35 | 640 |
| 1245258 | 410 | 425 | 8804 | 8819 | ATTATTCACCACGATT | 29 | 641 |
| 1245284 | 440 | 455 | 8834 | 8849 | GAGAAGATCGGCTGGA | 6 | 642 |
| 1245310 | 484 | 499 | 8878 | 8893 | ATGTTGACCTCAAATG | 0 | 643 |
| 1245336 | 530 | 545 | 10416 | 10431 | CATCATCGATGGAAGA | 14 | 644 |
| 1245362 | 577 | 592 | 10463 | 10478 | TGGCCGCACACTGAAG | 0 | 645 |
| 1245388 | 638 | 653 | 12056 | 12071 | GTGAAAGCCAACAGCG | 62 | 646 |
| 1245414 | 696 | 711 | 12114 | 12129 | GACATGAGGTTTTGAT | 52 | 647 |
| 1245440 | 767 | 782 | 15648 | 15663 | TGTCTCCAATACAGGC | 39 | 648 |
| 1245466 | 799 | 814 | 15680 | 15695 | ATTCCATCTATCAGAC | 7 | 649 |
| 1245492* | 867 | 882 | N/A | N/A | GAAACTTCTGTAGTCT | 86 | 650 |
| 1245518* | 931 | 946 | 20746 | 20761 | CCAACCACTGCTTCAA | 98 | 651 |
| 1245544* | 982 | 997 | 20797 | 20812 | GCATACATCTCTGGCT | 27 | 652 |
| 1245570 | 1023 | 1038 | 20838 | 20853 | GCTTTGCAGCATTGAT | 61 | 653 |
| 1245596 | 1110 | 1125 | 20925 | 20940 | ACAGGTAATTAATCTT | 39 | 654 |
| 1245622 | 1268 | 1283 | 21083 | 21098 | TTTAGGGAGGTAGCTT | 24 | 655 |
| 1245648 | 1322 | 1337 | 21137 | 21152 | TACTTGAACAGTCTTA | 48 | 656 |
| 1245674 | 1349 | 1364 | 21164 | 21179 | CTGTGGCATGGCTACA | 66 | 657 |
| 1245700 | 1393 | 1408 | 21208 | 21223 | TTGATCTCTTAGCTGT | 74 | 658 |
| 1245726 | 1461 | 1476 | 21276 | 21291 | CTAGGGAAATCTTTCA | 48 | 659 |
| 1245752 | 1507 | 1522 | 21322 | 21337 | TCCAGAATAGAGTTGC | 46 | 660 |
| 1245778 | 1566 | 1581 | 21381 | 21396 | AGAGGGTCCACTTTTG | 34 | 661 |
| 1245804 | 1625 | 1640 | 21440 | 21455 | AATAGAGTCGGTCACC | 58 | 662 |
| 1245830 | 1728 | 1743 | 21543 | 21558 | GCCTAAAATTGTCTAA | 32 | 663 |
| 1245841 | 1765 | 1780 | 21580 | 21595 | GTACAGTTCCTTTTCC | 49 | 38 |
| 1245856 | 1780 | 1795 | 21595 | 21610 | CTTATGTAATAGCCAG | 74 | 664 |
| 1245882 | 2185 | 2200 | 22000 | 22015 | ATGTAGTGGGAGTCGG | 72 | 665 |
| 1245908 | 2256 | 2271 | 22071 | 22086 | AACAAGAGGATAGTCC | 54 | 666 |
| 1245934 | N/A | N/A | 3489 | 3504 | ACAGACTAAGGGACCA | 68 | 667 |
| 1245960 | N/A | N/A | 3613 | 3628 | CCTCATTTAGCAGCTT | 81 | 668 |
| 1245986 | N/A | N/A | 4138 | 4153 | CTCAAGGAGTACTTCA | 82 | 669 |
| 1246012 | N/A | N/A | 4644 | 4659 | TTAATACGACTTCCTT | 35 | 670 |
| 1246038 | N/A | N/A | 5126 | 5141 | GGCAAAAGGAGCCAGT | 43 | 671 |
| 1246064 | N/A | N/A | 5655 | 5670 | GTTACCAGAGCATTCA | 73 | 672 |
| 1246065 | N/A | N/A | 5659 | 5674 | ATAAGTTACCAGAGCA | 89 | 48 |
| 1246090 | N/A | N/A | 5872 | 5887 | GCTAAACCCTGGAGCA | 5 | 673 |
| 1246116 | N/A | N/A | 6089 | 6104 | CAAGTTTTCACCTCAG | 93 | 674 |
| 1246142 | N/A | N/A | 6357 | 6372 | GGGAAAGAAGTCTCCT | 13 | 675 |
| 1246168 | N/A | N/A | 6610 | 6625 | TCTCTAAAGCAGGCTA | 60 | 676 |
| 1246194 | N/A | N/A | 7770 | 7785 | TAGCAGCTAAAATCCA | 66 | 677 |
| 1246220 | N/A | N/A | 7978 | 7993 | TGCAAAGTTAATAGGA | 43 | 678 |
| 1246246 | N/A | N/A | 8487 | 8502 | CTATATAAATTCTGAC | 0 | 679 |
| 1246272 | N/A | N/A | 8939 | 8954 | TAAGAGAAGGTGCACA | 12 | 680 |
| 1246298 | N/A | N/A | 9130 | 9145 | GATACTGGTGGACAAG | 13 | 681 |
| 1246324 | N/A | N/A | 9410 | 9425 | GTATAGCTGCATTTCT | 35 | 682 |
| 1246350 | N/A | N/A | 9601 | 9616 | CATATGTGAAGAGCTG | 25 | 683 |
| 1246376 | N/A | N/A | 9776 | 9791 | AACTAGAACTCCCAAC | 0 | 684 |
| 1246402 | N/A | N/A | 10025 | 10040 | GGCTTTATCATTCTAA | 20 | 685 |
| 1246428 | N/A | N/A | 10384 | 10399 | TAAGGATCATTGCAGA | 0 | 686 |
| 1246454 | N/A | N/A | 10855 | 10870 | CCATTTACATATGGTG | 28 | 687 |
| 1246480 | N/A | N/A | 11469 | 11484 | GGCAAATACAGCAGTA | 64 | 688 |
| 1246506 | N/A | N/A | 11792 | 11807 | CTCTATTGATTGGCTT | 65 | 689 |
| 1246532 | N/A | N/A | 12168 | 12183 | CTTACCTTGTGCTTGG | 34 | 690 |
| 1246558 | N/A | N/A | 12486 | 12501 | GACTAAGGAGCTAGAT | 25 | 691 |
| 1246584 | N/A | N/A | 12655 | 12670 | GCAGAATATATACTAG | 55 | 692 |
| 1246610 | N/A | N/A | 12799 | 12814 | GCTGTAAGAGTCAGTA | 89 | 693 |
| 1246636 | N/A | N/A | 13733 | 13748 | CTTATTAAGTACTGTG | 0 | 694 |
| 1246662 | N/A | N/A | 13916 | 13931 | CCATTATCCTTACTCC | 27 | 695 |
| 1246688 | N/A | N/A | 14089 | 14104 | CTACATGGATCCAACA | 5 | 696 |
| 1246714 | N/A | N/A | 14266 | 14281 | GAGGAGTTAGGGAGCC | 36 | 697 |
| 1246740 | N/A | N/A | 14469 | 14484 | ACAACTGGAGGTATGT | 0 | 698 |
| 1246766 | N/A | N/A | 15023 | 15038 | TTGATAAAATAGGGTG | 46 | 699 |
| 1246792 | N/A | N/A | 15353 | 15368 | AGGAGTAGTGGAGCCA | 16 | 700 |
| 1246818 | N/A | N/A | 15443 | 15458 | TATCAGAAACTTATAC | 0 | 701 |
| 1246844 | N/A | N/A | 16191 | 16206 | GAAATAACTGTTCTCC | 32 | 702 |
| 1246870 | N/A | N/A | 16969 | 16984 | TCCAATATATACTGAC | 72 | 703 |
| 1246896 | N/A | N/A | 17930 | 17945 | GCTGAGAGAGTATTTC | 51 | 704 |
| 1246922 | N/A | N/A | 18508 | 18523 | ACACTAATTTAGTCAA | 16 | 705 |
| 1246948 | N/A | N/A | 18848 | 18863 | CTTTTAACTACCCTCA | 16 | 706 |
| 1246974 | N/A | N/A | 19490 | 19505 | CCATCTAGAATTAAGG | 0 | 707 |
| 1247000 | N/A | N/A | 19731 | 19746 | ACTGAAGGTCTGAGCT | 20 | 708 |
| 1247026 | N/A | N/A | 19922 | 19937 | CTCCAAGGAGTGCATC | 53 | 709 |
| 1247052 | N/A | N/A | 20359 | 20374 | AAATTATTGCCTGAAC | 32 | 710 |
| 1247078 | N/A | N/A | 20484 | 20499 | CTTCATAGTGGACTTC | 79 | 711 |

TABLE 10
Inhibition of HSD17B13 RNA by 3-10-3 cEt
gapmers targeting SEQ ID NO: 1, and 2

| | SEQ | | SEQ | | | | |
|---|---|---|---|---|---|---|---|
| | ID | SEQ | ID | SEQ | | | |
| | NO: 1 | ID NO: | NO: 2 | ID NO: | | HSD17B13 | SEQ |
| Compound | Start | 1 Stop | Start | 2 Stop | | (% | ID |
| Number | Site | Site | Site | Site | Sequence (5′ to 3′) | Inhibition) | NO |
| 1245077 | 13 | 28 | 3107 | 3122 | GTGTAGTCCTAGGGAG | 67 | 712 |
| 1245103 | 71 | 86 | 3165 | 3180 | GATTTCTAGGATGATG | 57 | 713 |
| 1245129 | 120 | 135 | 3214 | 3229 | TCACCAACGACTCCAA | 19 | 714 |
| 1245155 | 212 | 227 | 3306 | 3321 | ATAAGTAGTCTGCCTG | 43 | 715 |
| 1245181 | 272 | 287 | N/A | N/A | CTCCACACCGCGCTTA | 7 | 716 |
| 1245207 | 319 | 334 | 7608 | 7623 | TACGCATGCGCAGTGA | 60 | 717 |
| 1245233 | 368 | 383 | 7657 | 7672 | CTGATTTAGAGAGCGA | 61 | 718 |
| 1245259 | 411 | 426 | 8805 | 8820 | CATTATTCACCACGAT | 33 | 719 |
| 1245285 | 441 | 456 | 8835 | 8850 | TGAGAAGATCGGCTGG | 37 | 720 |
| 1245311 | 485 | 500 | 8879 | 8894 | GATGTTGACCTCAAAT | 0 | 721 |
| 1245337 | 531 | 546 | 10417 | 10432 | CCATCATCGATGGAAG | 8 | 722 |
| 1245363 | 578 | 593 | 10464 | 10479 | GTGGCCGCACACTGAA | 41 | 723 |
| 1245389 | 642 | 657 | 12060 | 12075 | CTCTGTGAAAGCCAAC | 50 | 724 |
| 1245415 | 698 | 713 | 12116 | 12131 | GAGACATGAGGTTTTG | 77 | 725 |
| 1245441 | 768 | 783 | 15649 | 15664 | CTGTCTCCAATACAGG | 29 | 726 |
| 1245467 | 801 | 816 | 15682 | 15697 | GTATTCCATCTATCAG | 52 | 727 |
| 1245493* | 877 | 892 | N/A | N/A | CGTTCAGGAAGAAACT | 70 | 728 |
| 1245519* | 932 | 947 | 20747 | 20762 | GCCAACCACTGCTTCA | 97 | 729 |
| 1245545* | 983 | 998 | 20798 | 20813 | TGCATACATCTCTGGC | 53 | 730 |
| 1245571 | 1024 | 1039 | 20839 | 20854 | AGCTTTGCAGCATTGA | 62 | 731 |
| 1245597 | 1111 | 1126 | 20926 | 20941 | GACAGGTAATTAATCT | 60 | 732 |
| 1245623 | 1269 | 1284 | 21084 | 21099 | TTTTAGGGAGGTAGCT | 39 | 733 |
| 1245649 | 1323 | 1338 | 21138 | 21153 | CTACTTGAACAGTCTT | 80 | 734 |
| 1245675 | 1350 | 1365 | 21165 | 21180 | TCTGTGGCATGGCTAC | 67 | 735 |
| 1245701 | 1394 | 1409 | 21209 | 21224 | CTTGATCTCTTAGCTG | 51 | 736 |
| 1245727 | 1462 | 1477 | 21277 | 21292 | GCTAGGGAAATCTTTC | 66 | 737 |
| 1245753 | 1508 | 1523 | 21323 | 21338 | GTCCAGAATAGAGTTG | 60 | 738 |
| 1245779 | 1567 | 1582 | 21382 | 21397 | TAGAGGGTCCACTTTT | 36 | 739 |
| 1245805 | 1626 | 1641 | 21441 | 21456 | AAATAGAGTCGGTCAC | 59 | 740 |
| 1245831 | 1729 | 1744 | 21544 | 21559 | AGCCTAAAATTGTCTA | 53 | 741 |
| 1245857 | 1781 | 1796 | 21596 | 21611 | TCTTATGTAATAGCCA | 77 | 742 |
| 1245883 | 2186 | 2201 | 22001 | 22016 | GATGTAGTGGGAGTCG | 67 | 743 |
| 1245909 | 2257 | 2272 | 22072 | 22087 | AAACAAGAGGATAGTC | 48 | 744 |
| 1245935 | N/A | N/A | 3492 | 3507 | TATACAGACTAAGGGA | 24 | 745 |
| 1245961 | N/A | N/A | 3629 | 3644 | GATAATATGTGACTTG | 68 | 746 |
| 1245987 | N/A | N/A | 4139 | 4154 | TCTCAAGGAGTACTTC | 80 | 747 |
| 1246013 | N/A | N/A | 4645 | 4660 | TTTAATACGACTTCCT | 72 | 748 |
| 1246039 | N/A | N/A | 5156 | 5171 | CAAACTGCTACTGTGT | 57 | 749 |
| 1246065 | N/A | N/A | 5659 | 5674 | ATAAGTTACCAGAGCA | 91 | 48 |
| 1246091 | N/A | N/A | 5875 | 5890 | TAGGCTAAACCCTGGA | 64 | 750 |
| 1246117 | N/A | N/A | 6134 | 6149 | CTCTAATGTTTCTTGA | 53 | 751 |
| 1246143 | N/A | N/A | 6422 | 6437 | TAAACTGTATGCCTCT | 49 | 752 |
| 1246169 | N/A | N/A | 6622 | 6637 | CAGTAGGCAGTTTCTC | 72 | 753 |
| 1246195 | N/A | N/A | 7776 | 7791 | TTCAGTTAGCAGCTAA | 72 | 754 |
| 1246221 | N/A | N/A | 7979 | 7994 | CTGCAAAGTTAATAGG | 57 | 755 |
| 1246247 | N/A | N/A | 8529 | 8544 | GTTTATCAGTAAAGTG | 64 | 756 |
| 1246273 | N/A | N/A | 8940 | 8955 | TTAAGAGAAGGTGCAC | 38 | 757 |
| 1246299 | N/A | N/A | 9146 | 9161 | GCCAAGCTTTGTGTCA | 64 | 758 |
| 1246325 | N/A | N/A | 9413 | 9428 | TCTGTATAGCTGCATT | 47 | 759 |
| 1246351 | N/A | N/A | 9603 | 9618 | CACATATGTGAAGAGC | 71 | 760 |
| 1246377 | N/A | N/A | 9780 | 9795 | ATAGAACTAGAACTCC | 22 | 761 |
| 1246403 | N/A | N/A | 10058 | 10073 | GATAATTTGGTGTCAT | 59 | 762 |
| 1246429 | N/A | N/A | 10385 | 10400 | TTAAGGATCATTGCAG | 14 | 763 |
| 1246455 | N/A | N/A | 10931 | 10946 | CATAAGGCCGATTCAT | 32 | 764 |
| 1246481 | N/A | N/A | 11482 | 11497 | GGAAAGGATATTTGGC | 58 | 765 |
| 1246507 | N/A | N/A | 11793 | 11808 | ACTCTATTGATTGGCT | 57 | 766 |
| 1246533 | N/A | N/A | 12178 | 12193 | TGATTTTGACCTTACC | 11 | 767 |
| 1246559 | N/A | N/A | 12487 | 12502 | TGACTAAGGAGCTAGA | 31 | 768 |
| 1246585 | N/A | N/A | 12685 | 12700 | ATTAAGCTTAGTATAT | 10 | 769 |
| 1246611 | N/A | N/A | 12810 | 12825 | AGCTAACTCAGGCTGT | 14 | 770 |
| 1246637 | N/A | N/A | 13738 | 13753 | GCATACTTATTAAGTA | 32 | 771 |
| 1246663 | N/A | N/A | 13917 | 13932 | TCCATTATCCTTACTC | 15 | 772 |
| 1246689 | N/A | N/A | 14090 | 14105 | TCTACATGGATCCAAC | 26 | 773 |
| 1246715 | N/A | N/A | 14280 | 14295 | TGTAAAGGCTGGGTGA | 26 | 774 |
| 1246741 | N/A | N/A | 14473 | 14488 | TATGACAACTGGAGGT | 14 | 775 |
| 1246767 | N/A | N/A | 15024 | 15039 | GTTGATAAAATAGGGT | 42 | 776 |
| 1246793 | N/A | N/A | 15354 | 15369 | AAGGAGTAGTGGAGCC | 38 | 777 |
| 1246819 | N/A | N/A | 15445 | 15460 | GTTATCAGAAACTTAT | 31 | 778 |
| 1246845 | N/A | N/A | 16219 | 16234 | TTATAGACTGGGTAGG | 51 | 779 |
| 1246871 | N/A | N/A | 17017 | 17032 | GTTTAGCAATTTAGCA | 50 | 780 |
| 1246897 | N/A | N/A | 17956 | 17971 | ATTTAGAAACTGCTCC | 21 | 781 |
| 1246923 | N/A | N/A | 18521 | 18536 | GCTTAGTACCAAGACA | 62 | 782 |
| 1246949 | N/A | N/A | 18849 | 18864 | CCTTTTAACTACCCTC | 22 | 783 |
| 1246975 | N/A | N/A | 19533 | 19548 | AGGCTAAAATGGTCAT | 36 | 784 |
| 1247001 | N/A | N/A | 19736 | 19751 | CTAAAACTGAAGGTCT | 40 | 785 |
| 1247027 | N/A | N/A | 19936 | 19951 | TAGGAACATTCCCTCT | 24 | 786 |
| 1247053 | N/A | N/A | 20362 | 20377 | TCTAAATTATTGCCTG | 43 | 787 |
| 1247079 | N/A | N/A | 20485 | 20500 | ACTTCATAGTGGACTT | 61 | 788 |

TABLE 11
Inhibition of HSD17B13 RNA by 3-10-3 cEt
gapmers targeting SEQ ID NO: 1, and 2

| | SEQ | | SEQ | | | | |
|---|---|---|---|---|---|---|---|
| | ID | SEQ | ID | SEQ | | | |
| | NO: 1 | ID NO: | NO: 2 | ID NO: | | HSD17B13 | SEQ |
| Compound | Start | 1 Stop | Start | 2 Stop | | (% | ID |
| Number | Site | Site | Site | Site | Sequence (5′ to 3′) | Inhibition) | NO |
| 1245078 | 14 | 29 | 3108 | 3123 | TGTGTAGTCCTAGGGA | 50 | 789 |
| 1245104 | 72 | 87 | 3166 | 3181 | GGATTTCTAGGATGAT | 58 | 790 |
| 1245130 | 121 | 136 | 3215 | 3230 | TTCACCAACGACTCCA | 62 | 791 |
| 1245156 | 213 | 228 | 3307 | 3322 | CATAAGTAGTCTGCCT | 31 | 792 |
| 1245182 | 273 | 288 | N/A | N/A | CCTCCACACCGCGCTT | 16 | 793 |
| 1245208 | 320 | 335 | 7609 | 7624 | ATACGCATGCGCAGTG | 38 | 794 |
| 1245234 | 369 | 384 | 7658 | 7673 | CCTGATTTAGAGAGCG | 42 | 795 |
| 1245260 | 412 | 427 | 8806 | 8821 | GCATTATTCACCACGA | 59 | 796 |
| 1245286 | 442 | 457 | 8836 | 8851 | CTGAGAAGATCGGCTG | 37 | 797 |
| 1245312 | 486 | 501 | 8880 | 8895 | GGATGTTGACCTCAAA | 5 | 798 |
| 1245338 | 532 | 547 | 10418 | 10433 | TCCATCATCGATGGAA | 31 | 799 |
| 1245364 | 579 | 594 | 10465 | 10480 | CGTGGCCGCACACTGA | 42 | 800 |
| 1245390 | 645 | 660 | 12063 | 12078 | GACCTCTGTGAAAGCC | 46 | 801 |
| 1245416 | 715 | 730 | 12133 | 12148 | TTCACAAAAACTGGGC | 37 | 802 |
| 1245442 | 769 | 784 | 15650 | 15665 | TCTGTCTCCAATACAG | 13 | 803 |
| 1245468 | 802 | 817 | 15683 | 15698 | AGTATTCCATCTATCA | 62 | 804 |
| 1245494* | 891 | 906 | 20706 | 20721 | AAATCGCTGAGGCGCG | 89 | 805 |
| 1245520* | 933 | 948 | 20748 | 20763 | GGCCAACCACTGCTTC | 93 | 806 |
| 1245546* | 984 | 999 | 20799 | 20814 | ATGCATACATCTCTGG | 53 | 807 |
| 1245572 | 1025 | 1040 | 20840 | 20855 | AAGCTTTGCAGCATTG | 59 | 808 |
| 1245598 | 1112 | 1127 | 20927 | 20942 | AGACAGGTAATTAATC | 29 | 809 |
| 1245624 | 1270 | 1285 | 21085 | 21100 | CTTTTAGGGAGGTAGC | 62 | 810 |
| 1245650 | 1324 | 1339 | 21139 | 21154 | GCTACTTGAACAGTCT | 66 | 811 |
| 1245676 | 1351 | 1366 | 21166 | 21181 | TTCTGTGGCATGGCTA | 78 | 812 |
| 1245702 | 1395 | 1410 | 21210 | 21225 | ACTTGATCTCTTAGCT | 59 | 813 |
| 1245728 | 1463 | 1478 | 21278 | 21293 | GGCTAGGGAAATCTTT | 57 | 814 |
| 1245754 | 1509 | 1524 | 21324 | 21339 | AGTCCAGAATAGAGTT | 58 | 815 |
| 1245780 | 1568 | 1583 | 21383 | 21398 | ATAGAGGGTCCACTTT | 21 | 816 |
| 1245806 | 1627 | 1642 | 21442 | 21457 | AAAATAGAGTCGGTCA | 71 | 817 |
| 1245832 | 1730 | 1745 | 21545 | 21560 | GAGCCTAAAATTGTCT | 49 | 818 |
| 1245858 | 1782 | 1797 | 21597 | 21612 | TTCTTATGTAATAGCC | 71 | 819 |
| 1245884 | 2187 | 2202 | 22002 | 22017 | TGATGTAGTGGGAGTC | 65 | 820 |
| 1245910 | 2349 | 2364 | 22164 | 22179 | CTACAAGAGGTTATTT | 31 | 821 |
| 1245936 | N/A | N/A | 3493 | 3508 | ATATACAGACTAAGGG | 24 | 822 |
| 1245962 | N/A | N/A | 3671 | 3686 | AAGTTATTATCCCCAC | 60 | 823 |
| 1245988 | N/A | N/A | 4220 | 4235 | AACTAAACATGACAGC | 72 | 824 |
| 1246014 | N/A | N/A | 4646 | 4661 | TTTTAATACGACTTCC | 57 | 825 |
| 1246040 | N/A | N/A | 5164 | 5179 | ATAAGAGCCAAACTGC | 49 | 826 |
| 1246066 | N/A | N/A | 5660 | 5675 | CATAAGTTACCAGAGC | 80 | 827 |
| 1246092 | N/A | N/A | 5878 | 5893 | CTGTAGGCTAAACCCT | 47 | 828 |
| 1246118 | N/A | N/A | 6135 | 6150 | GCTCTAATGTTTCTTG | 62 | 829 |
| 1246144 | N/A | N/A | 6423 | 6438 | GTAAACTGTATGCCTC | 74 | 830 |
| 1246170 | N/A | N/A | 6624 | 6639 | TACAGTAGGCAGTTTC | 60 | 831 |
| 1246196 | N/A | N/A | 7777 | 7792 | CTTCAGTTAGCAGCTA | 50 | 832 |
| 1246222 | N/A | N/A | 8039 | 8054 | ACTACATTAACACCAA | 46 | 833 |
| 1246248 | N/A | N/A | 8534 | 8549 | TGCAAGTTTATCAGTA | 70 | 834 |
| 1246274 | N/A | N/A | 8941 | 8956 | CTTAAGAGAAGGTGCA | 43 | 835 |
| 1246300 | N/A | N/A | 9188 | 9203 | CTTAACAAACCTCCAC | 3 | 836 |
| 1246326 | N/A | N/A | 9424 | 9439 | ATTATATGAGGTCTGT | 59 | 837 |
| 1246352 | N/A | N/A | 9604 | 9619 | TCACATATGTGAAGAG | 27 | 838 |
| 1246378 | N/A | N/A | 9781 | 9796 | CATAGAACTAGAACTC | 19 | 839 |
| 1246404 | N/A | N/A | 10059 | 10074 | TGATAATTTGGTGTCA | 3 | 840 |
| 1246430 | N/A | N/A | 10386 | 10401 | CTTAAGGATCATTGCA | 29 | 841 |
| 1246456 | N/A | N/A | 10971 | 10986 | GTAATCTTGAGGCAGG | 51 | 842 |
| 1246482 | N/A | N/A | 11511 | 11526 | TATTATGAGGATCTGG | 44 | 843 |
| 1246508 | N/A | N/A | 11853 | 11868 | AGCAGAATTGTGAACG | 67 | 844 |
| 1246534 | N/A | N/A | 12194 | 12209 | CATACCCATTCTAACT | 6 | 845 |
| 1246560 | N/A | N/A | 12488 | 12503 | TTGACTAAGGAGCTAG | 20 | 846 |
| 1246586 | N/A | N/A | 12686 | 12701 | CATTAAGCTTAGTATA | 19 | 847 |
| 1246612 | N/A | N/A | 12813 | 12828 | CATAGCTAACTCAGGC | 29 | 848 |
| 1246638 | N/A | N/A | 13748 | 13763 | CTTACATATTGCATAC | 35 | 849 |
| 1246664 | N/A | N/A | 13951 | 13966 | CTAAGTTAGCCCCCAG | 15 | 850 |
| 1246690 | N/A | N/A | 14091 | 14106 | ATCTACATGGATCCAA | 12 | 851 |
| 1246716 | N/A | N/A | 14283 | 14298 | GAATGTAAAGGCTGGG | 42 | 852 |
| 1246742 | N/A | N/A | 14477 | 14492 | GGAGTATGACAACTGG | 28 | 853 |
| 1246768 | N/A | N/A | 15170 | 15185 | CGTTTAAATCAGAGCA | 54 | 854 |
| 1246794 | N/A | N/A | 15355 | 15370 | TAAGGAGTAGTGGAGC | 18 | 855 |
| 1246820 | N/A | N/A | 15492 | 15507 | ATTAATGCCACCCTAC | 6 | 856 |
| 1246846 | N/A | N/A | 16223 | 16238 | CTTTTTATAGACTGGG | 67 | 857 |
| 1246872 | N/A | N/A | 17019 | 17034 | AGGTTTAGCAATTTAG | 54 | 858 |
| 1246898 | N/A | N/A | 17985 | 18000 | ATAGTTATCTTCTCAC | 48 | 859 |
| 1246924 | N/A | N/A | 18585 | 18600 | TATTAATATGACTTGC | 25 | 860 |
| 1246950 | N/A | N/A | 18850 | 18865 | GCCTTTTAACTACCCT | 0 | 861 |
| 1246976 | N/A | N/A | 19534 | 19549 | TAGGCTAAAATGGTCA | 59 | 862 |
| 1247002 | N/A | N/A | 19739 | 19754 | GATCTAAAACTGAAGG | 44 | 863 |
| 1247028 | N/A | N/A | 19970 | 19985 | AATTTCATACAGTTCG | 66 | 864 |
| 1247054 | N/A | N/A | 20363 | 20378 | GTCTAAATTATTGCCT | 45 | 865 |
| 1247080 | N/A | N/A | 20489 | 20504 | CATAACTTCATAGTGG | 31 | 866 |

TABLE 12
Inhibition of HSD17B13 RNA by 3-10-3 cEt
gapmers targeting SEQ ID NO: 1, and 2

| | SEQ | | SEQ | | | | |
|---|---|---|---|---|---|---|---|
| | ID | SEQ | ID | SEQ | | | |
| | NO: 1 | ID NO: | NO: 2 | ID NO: | | HSD17B13 | SEQ |
| Compound | Start | 1 Stop | Start | 2 Stop | | (% | ID |
| Number | Site | Site | Site | Site | Sequence (5′ to 3′) | Inhibition) | NO |
| 1245079 | 15 | 30 | 3109 | 3124 | TTGTGTAGTCCTAGGG | 64 | 867 |
| 1245105 | 75 | 90 | 3169 | 3184 | GAAGGATTTCTAGGAT | 71 | 868 |
| 1245131 | 122 | 137 | 3216 | 3231 | CTTCACCAACGACTCC | 8 | 869 |
| 1245157 | 214 | 229 | 3308 | 3323 | TCATAAGTAGTCTGCC | 62 | 870 |
| 1245183 | 274 | 289 | 7563 | 7578 | TCCTCCACACCGCGCT | 20 | 871 |
| 1245209 | 321 | 336 | 7610 | 7625 | CATACGCATGCGCAGT | 60 | 872 |
| 1245235 | 370 | 385 | 7659 | 7674 | ACCTGATTTAGAGAGC | 65 | 873 |
| 1245261 | 413 | 428 | 8807 | 8822 | AGCATTATTCACCACG | 53 | 874 |
| 1245287 | 443 | 458 | 8837 | 8852 | GCTGAGAAGATCGGCT | 10 | 875 |
| 1245313 | 487 | 502 | 8881 | 8896 | AGGATGTTGACCTCAA | 4 | 876 |
| 1245339 | 533 | 548 | 10419 | 10434 | CTCCATCATCGATGGA | 0 | 877 |
| 1245365 | 593 | 608 | 10479 | 10494 | GTAAGGAATCCCTTCG | 22 | 878 |
| 1245391 | 646 | 661 | 12064 | 12079 | AGACCTCTGTGAAAGC | 50 | 879 |
| 1245417 | 723 | 738 | 12141 | 12156 | ACCCAGTATTCACAAA | 10 | 880 |
| 1245443 | 770 | 785 | 15651 | 15666 | ATCTGTCTCCAATACA | 55 | 881 |
| 1245469 | 803 | 818 | 15684 | 15699 | AAGTATTCCATCTATC | 52 | 882 |
| 1245495* | 892 | 907 | 20707 | 20722 | AAAATCGCTGAGGCGC | 97 | 883 |
| 1245521* | 934 | 949 | 20749 | 20764 | TGGCCAACCACTGCTT | 98 | 884 |
| 1245547* | 985 | 1000 | 20800 | 20815 | CATGCATACATCTCTG | 55 | 885 |
| 1245573 | 1029 | 1044 | 20844 | 20859 | AATAAAGCTTTGCAGC | 26 | 886 |
| 1245599 | 1117 | 1132 | 20932 | 20947 | CAGGAAGACAGGTAAT | 60 | 887 |
| 1245625 | 1271 | 1286 | 21086 | 21101 | ACTTTTAGGGAGGTAG | 20 | 888 |
| 1245651 | 1325 | 1340 | 21140 | 21155 | TGCTACTTGAACAGTC | 81 | 889 |
| 1245677 | 1353 | 1368 | 21168 | 21183 | TATTCTGTGGCATGGC | 71 | 890 |
| 1245703 | 1396 | 1411 | 21211 | 21226 | AACTTGATCTCTTAGC | 64 | 891 |
| 1245729 | 1464 | 1479 | 21279 | 21294 | AGGCTAGGGAAATCTT | 62 | 892 |
| 1245755 | 1510 | 1525 | 21325 | 21340 | AAGTCCAGAATAGAGT | 60 | 893 |
| 1245781 | 1569 | 1584 | 21384 | 21399 | TATAGAGGGTCCACTT | 17 | 894 |
| 1245807 | 1628 | 1643 | 21443 | 21458 | TAAAATAGAGTCGGTC | 81 | 895 |
| 1245833 | 1731 | 1746 | 21546 | 21561 | TGAGCCTAAAATTGTC | 30 | 896 |
| 1245841 | 1765 | 1780 | 21580 | 21595 | GTACAGTTCCTTTTCC | 57 | 38 |
| 1245859 | 1784 | 1799 | 21599 | 21614 | GTTTCTTATGTAATAG | 46 | 897 |
| 1245885 | 2188 | 2203 | 22003 | 22018 | TTGATGTAGTGGGAGT | 68 | 898 |
| 1245911 | 2350 | 2365 | 22165 | 22180 | ACTACAAGAGGTTATT | 46 | 899 |
| 1245937 | N/A | N/A | 3494 | 3509 | CATATACAGACTAAGG | 57 | 900 |
| 1245963 | N/A | N/A | 3672 | 3687 | TAAGTTATTATCCCCA | 70 | 901 |
| 1245989 | N/A | N/A | 4249 | 4264 | CTCTAAGTGTAAGAGA | 28 | 902 |
| 1246015 | N/A | N/A | 4647 | 4662 | TTTTTAATACGACTTC | 52 | 903 |
| 1246041 | N/A | N/A | 5165 | 5180 | CATAAGAGCCAAACTG | 27 | 904 |
| 1246065 | N/A | N/A | 5659 | 5674 | ATAAGTTACCAGAGCA | 90 | 48 |
| 1246067 | N/A | N/A | 5661 | 5676 | GCATAAGTTACCAGAG | 79 | 905 |
| 1246093 | N/A | N/A | 5889 | 5904 | GTATTTCGCTACTGTA | 76 | 906 |
| 1246119 | N/A | N/A | 6149 | 6164 | CCTAAGATAAAATTGC | 18 | 907 |
| 1246145 | N/A | N/A | 6425 | 6440 | TGGTAAACTGTATGCC | 76 | 908 |
| 1246171 | N/A | N/A | 6625 | 6640 | GTACAGTAGGCAGTTT | 50 | 909 |
| 1246197 | N/A | N/A | 7782 | 7797 | AACTACTTCAGTTAGC | 53 | 910 |
| 1246223 | N/A | N/A | 8043 | 8058 | GAAGACTACATTAACA | 36 | 911 |
| 1246249 | N/A | N/A | 8562 | 8577 | AAATTTCAGTACCCAG | 46 | 912 |
| 1246275 | N/A | N/A | 8942 | 8957 | TCTTAAGAGAAGGTGC | 39 | 913 |
| 1246301 | N/A | N/A | 9189 | 9204 | CCTTAACAAACCTCCA | 27 | 914 |
| 1246327 | N/A | N/A | 9426 | 9441 | CAATTATATGAGGTCT | 36 | 915 |
| 1246353 | N/A | N/A | 9610 | 9625 | GCCAATTCACATATGT | 34 | 916 |
| 1246379 | N/A | N/A | 9887 | 9902 | TATATGTTGATGTTAC | 34 | 917 |
| 1246405 | N/A | N/A | 10060 | 10075 | ATGATAATTTGGTGTC | 55 | 918 |
| 1246431 | N/A | N/A | 10387 | 10402 | TCTTAAGGATCATTGC | 0 | 919 |
| 1246457 | N/A | N/A | 10973 | 10988 | TTGTAATCTTGAGGCA | 27 | 920 |
| 1246483 | N/A | N/A | 11512 | 11527 | TTATTATGAGGATCTG | 50 | 921 |
| 1246509 | N/A | N/A | 11854 | 11869 | AAGCAGAATTGTGAAC | 18 | 922 |
| 1246535 | N/A | N/A | 12201 | 12216 | CATACCACATACCCAT | 0 | 923 |
| 1246561 | N/A | N/A | 12489 | 12504 | CTTGACTAAGGAGCTA | 24 | 924 |
| 1246587 | N/A | N/A | 12687 | 12702 | TCATTAAGCTTAGTAT | 31 | 925 |
| 1246613 | N/A | N/A | 12814 | 12829 | ACATAGCTAACTCAGG | 38 | 926 |
| 1246639 | N/A | N/A | 13763 | 13778 | GTACTATAGTATTTAC | 27 | 927 |
| 1246665 | N/A | N/A | 13952 | 13967 | TCTAAGTTAGCCCCCA | 36 | 928 |
| 1246691 | N/A | N/A | 14092 | 14107 | CATCTACATGGATCCA | 63 | 929 |
| 1246717 | N/A | N/A | 14316 | 14331 | TTAAGATGTCCAGGCA | 35 | 930 |
| 1246743 | N/A | N/A | 14479 | 14494 | AAGGAGTATGACAACT | 28 | 931 |
| 1246769 | N/A | N/A | 15211 | 15226 | CATAAAGCTGGATTGT | 0 | 932 |
| 1246795 | N/A | N/A | 15356 | 15371 | GTAAGGAGTAGTGGAG | 37 | 933 |
| 1246821 | N/A | N/A | 15493 | 15508 | CATTAATGCCACCCTA | 8 | 934 |
| 1246847 | N/A | N/A | 16254 | 16269 | AGTAGATTTGGTAGAG | 67 | 935 |
| 1246873 | N/A | N/A | 17041 | 17056 | GCTTATCGAGTTTAGC | 17 | 936 |
| 1246899 | N/A | N/A | 17987 | 18002 | GTATAGTTATCTTCTC | 59 | 937 |
| 1246925 | N/A | N/A | 18662 | 18677 | ATACTATTCTCCAACT | 25 | 938 |
| 1246951 | N/A | N/A | 18871 | 18886 | ATAAGAAGAGAGCTCA | 14 | 939 |
| 1246977 | N/A | N/A | 19544 | 19559 | GTTTAGCTGATAGGCT | 47 | 940 |
| 1247003 | N/A | N/A | 19749 | 19764 | TATGAGTAAAGATCTA | 10 | 941 |
| 1247029 | N/A | N/A | 20004 | 20019 | GTAATCAGTTTTCCTC | 79 | 942 |
| 1247055 | N/A | N/A | 20373 | 20388 | GTAAGGTAAAGTCTAA | 37 | 943 |
| 1247081 | N/A | N/A | 20490 | 20505 | ACATAACTTCATAGTG | 27 | 944 |

TABLE 13
Inhibition of HSD17B13 RNA by 3-10-3 cEt
gapmers targeting SEQ ID NO: 1, and 2

| | SEQ | | SEQ | | | | |
|---|---|---|---|---|---|---|---|
| | ID | SEQ | ID | SEQ | | | |
| | NO: 1 | ID NO: | NO: 2 | ID NO: | | HSD17B13 | SEQ |
| Compound | Start | 1 Stop | Start | 2 Stop | | (% | ID |
| Number | Site | Site | Site | Site | Sequence (5′ to 3′) | Inhibition) | NO |
| 1245080 | 16 | 31 | 3110 | 3125 | CTTGTGTAGTCCTAGG | 71 | 945 |
| 1245106 | 91 | 106 | 3185 | 3200 | ATGGTGATCAGAAGCA | 85 | 946 |
| 1245132 | 123 | 138 | 3217 | 3232 | ACTTCACCAACGACTC | 15 | 947 |
| 1245158 | 215 | 230 | 3309 | 3324 | TTCATAAGTAGTCTGC | 64 | 948 |
| 1245184 | 275 | 290 | 7564 | 7579 | TTCCTCCACACCGCGC | 47 | 949 |
| 1245210 | 322 | 337 | 7611 | 7626 | ACATACGCATGCGCAG | 20 | 950 |
| 1245236 | 371 | 386 | 7660 | 7675 | CACCTGATTTAGAGAG | 11 | 951 |
| 1245262 | 416 | 431 | 8810 | 8825 | CCCAGCATTATTCACC | 19 | 952 |
| 1245288 | 444 | 459 | 8838 | 8853 | TGCTGAGAAGATCGGC | 7 | 953 |
| 1245314 | 488 | 503 | 8882 | 8897 | TAGGATGTTGACCTCA | 19 | 954 |
| 1245340 | 534 | 549 | 10420 | 10435 | TCTCCATCATCGATGG | 24 | 955 |
| 1245366 | 594 | 609 | 10480 | 10495 | GGTAAGGAATCCCTTC | 43 | 956 |
| 1245392 | 649 | 664 | 12067 | 12082 | GTCAGACCTCTGTGAA | 34 | 957 |
| 1245418 | 724 | 739 | 12142 | 12157 | AACCCAGTATTCACAA | 0 | 958 |
| 1245444 | 771 | 786 | 15652 | 15667 | CATCTGTCTCCAATAC | 32 | 959 |
| 1245470 | 804 | 819 | 15685 | 15700 | TAAGTATTCCATCTAT | 31 | 960 |
| 1245496* | 893 | 908 | 20708 | 20723 | TAAAATCGCTGAGGCG | 87 | 961 |
| 1245522* | 935 | 950 | 20750 | 20765 | GTGGCCAACCACTGCT | 99 | 962 |
| 1245548* | 986 | 1001 | 20801 | 20816 | TCATGCATACATCTCT | 70 | 963 |
| 1245574 | 1055 | 1070 | 20870 | 20885 | ATATTATCAGGACTGA | 47 | 964 |
| 1245600 | 1136 | 1151 | 20951 | 20966 | CGTAAATATTCTTGAG | 61 | 965 |
| 1245626 | 1272 | 1287 | 21087 | 21102 | TACTTTTAGGGAGGTA | 28 | 966 |
| 1245652 | 1326 | 1341 | 21141 | 21156 | ATGCTACTTGAACAGT | 47 | 967 |
| 1245678 | 1354 | 1369 | 21169 | 21184 | ATATTCTGTGGCATGG | 69 | 968 |
| 1245704 | 1403 | 1418 | 21218 | 21233 | CTGCTGAAACTTGATC | 50 | 969 |
| 1245730 | 1465 | 1480 | 21280 | 21295 | GAGGCTAGGGAAATCT | 56 | 970 |
| 1245756 | 1516 | 1531 | 21331 | 21346 | GTAATAAAGTCCAGAA | 66 | 971 |
| 1245782 | 1570 | 1585 | 21385 | 21400 | ATATAGAGGGTCCACT | 18 | 972 |
| 1245808 | 1629 | 1644 | 21444 | 21459 | TTAAAATAGAGTCGGT | 65 | 973 |
| 1245834 | 1732 | 1747 | 21547 | 21562 | TTGAGCCTAAAATTGT | 36 | 974 |
| 1245841 | 1765 | 1780 | 21580 | 21595 | GTACAGTTCCTTTTCC | 58 | 38 |
| 1245860 | 1792 | 1807 | 21607 | 21622 | GGTCCATTGTTTCTTA | 36 | 975 |
| 1245886 | 2189 | 2204 | 22004 | 22019 | CTTGATGTAGTGGGAG | 83 | 976 |
| 1245912 | 2351 | 2366 | 22166 | 22181 | AACTACAAGAGGTTAT | 57 | 977 |
| 1245938 | N/A | N/A | 3495 | 3510 | ACATATACAGACTAAG | 46 | 978 |
| 1245964 | N/A | N/A | 3673 | 3688 | CTAAGTTATTATCCCC | 70 | 979 |
| 1245990 | N/A | N/A | 4296 | 4311 | GTATAGTATTCTTCAC | 81 | 980 |
| 1246016 | N/A | N/A | 4649 | 4664 | CATTTTTAATACGACT | 57 | 981 |
| 1246042 | N/A | N/A | 5166 | 5181 | GCATAAGAGCCAAACT | 67 | 982 |
| 1246065 | N/A | N/A | 5659 | 5674 | ATAAGTTACCAGAGCA | 87 | 48 |
| 1246068 | N/A | N/A | 5662 | 5677 | AGCATAAGTTACCAGA | 87 | 983 |
| 1246094 | N/A | N/A | 5891 | 5906 | TTGTATTTCGCTACTG | 58 | 984 |
| 1246120 | N/A | N/A | 6170 | 6185 | CCTAAATTCAAAGACC | 64 | 985 |
| 1246146 | N/A | N/A | 6429 | 6444 | GTAATGGTAAACTGTA | 70 | 986 |
| 1246172 | N/A | N/A | 6737 | 6752 | TGAGATTACCCCTGGC | 53 | 987 |
| 1246198 | N/A | N/A | 7785 | 7800 | CATAACTACTTCAGTT | 3 | 988 |
| 1246224 | N/A | N/A | 8121 | 8136 | CTTAGTTCATTGTGAT | 69 | 989 |
| 1246250 | N/A | N/A | 8564 | 8579 | CTAAATTTCAGTACCC | 33 | 990 |
| 1246276 | N/A | N/A | 8943 | 8958 | ATCTTAAGAGAAGGTG | 43 | 991 |
| 1246302 | N/A | N/A | 9190 | 9205 | CCCTTAACAAACCTCC | 43 | 992 |
| 1246328 | N/A | N/A | 9429 | 9444 | AACCAATTATATGAGG | 38 | 993 |
| 1246354 | N/A | N/A | 9632 | 9647 | GTGTAGTTTGGTGGGC | 33 | 994 |
| 1246380 | N/A | N/A | 9908 | 9923 | CCTATTTGTAATATTG | 0 | 995 |
| 1246406 | N/A | N/A | 10062 | 10077 | TTATGATAATTTGGTG | 0 | 996 |
| 1246432 | N/A | N/A | 10388 | 10403 | ATCTTAAGGATCATTG | 7 | 997 |
| 1246458 | N/A | N/A | 10976 | 10991 | GCATTGTAATCTTGAG | 35 | 998 |
| 1246484 | N/A | N/A | 11513 | 11528 | TTTATTATGAGGATCT | 43 | 999 |
| 1246510 | N/A | N/A | 11856 | 11871 | TTAAGCAGAATTGTGA | 7 | 1000 |
| 1246536 | N/A | N/A | 12203 | 12218 | ATCATACCACATACCC | 45 | 1001 |
| 1246562 | N/A | N/A | 12501 | 12516 | GCAGAAATTCACCTTG | 74 | 1002 |
| 1246588 | N/A | N/A | 12690 | 12705 | GAATCATTAAGCTTAG | 63 | 1003 |
| 1246614 | N/A | N/A | 12816 | 12831 | CCACATAGCTAACTCA | 53 | 1004 |
| 1246640 | N/A | N/A | 13768 | 13783 | CAATAGTACTATAGTA | 14 | 1005 |
| 1246666 | N/A | N/A | 13953 | 13968 | CTCTAAGTTAGCCCCC | 38 | 1006 |
| 1246692 | N/A | N/A | 14126 | 14141 | AATTACTCCGTTCTGC | 6 | 1007 |
| 1246718 | N/A | N/A | 14317 | 14332 | ATTAAGATGTCCAGGC | 31 | 1008 |
| 1246744 | N/A | N/A | 14480 | 14495 | CAAGGAGTATGACAAC | 6 | 1009 |
| 1246770 | N/A | N/A | 15213 | 15228 | TCCATAAAGCTGGATT | 13 | 1010 |
| 1246796 | N/A | N/A | 15358 | 15373 | TGGTAAGGAGTAGTGG | 34 | 1011 |
| 1246822 | N/A | N/A | 15494 | 15509 | GCATTAATGCCACCCT | 36 | 1012 |
| 1246848 | N/A | N/A | 16255 | 16270 | CAGTAGATTTGGTAGA | 49 | 1013 |
| 1246874 | N/A | N/A | 17042 | 17057 | AGCTTATCGAGTTTAG | 54 | 1014 |
| 1246900 | N/A | N/A | 17988 | 18003 | AGTATAGTTATCTTCT | 67 | 1015 |
| 1246926 | N/A | N/A | 18663 | 18678 | GATACTATTCTCCAAC | 44 | 1016 |
| 1246952 | N/A | N/A | 18872 | 18887 | GATAAGAAGAGAGCTC | 36 | 1017 |
| 1246978 | N/A | N/A | 19549 | 19564 | ATATTGTTTAGCTGAT | 14 | 1018 |
| 1247004 | N/A | N/A | 19751 | 19766 | GATATGAGTAAAGATC | 23 | 1019 |
| 1247030 | N/A | N/A | 20006 | 20021 | GAGTAATCAGTTTTCC | 65 | 1020 |
| 1247056 | N/A | N/A | 20374 | 20389 | AGTAAGGTAAAGTCTA | 55 | 1021 |
| 1247082 | N/A | N/A | 20492 | 20507 | TGACATAACTTCATAG | 51 | 1022 |

TABLE 14
Inhibition of HSD17B13 RNA by 3-10-3 cEt
gapmers targeting SEQ ID NO: 1, and 2

| | SEQ | | SEQ | | | | |
|---|---|---|---|---|---|---|---|
| | ID | SEQ | ID | SEQ | | | |
| | NO: 1 | ID NO: | NO: 2 | ID NO: | | HSD17B13 | SEQ |
| Compound | Start | 1 Stop | Start | 2 Stop | | (% | ID |
| Number | Site | Site | Site | Site | Sequence (5′ to 3′) | Inhibition) | NO |
| 1245081 | 17 | 32 | 3111 | 3126 | CCTTGTGTAGTCCTAG | 67 | 1023 |
| 1245107 | 92 | 107 | 3186 | 3201 | GATGGTGATCAGAAGC | 52 | 1024 |
| 1245133 | 124 | 139 | 3218 | 3233 | AACTTCACCAACGACT | 0 | 1025 |
| 1245159 | 216 | 231 | 3310 | 3325 | ATTCATAAGTAGTCTG | 35 | 1026 |
| 1245185 | 276 | 291 | 7565 | 7580 | TTTCCTCCACACCGCG | 18 | 1027 |
| 1245211 | 323 | 338 | 7612 | 7627 | CACATACGCATGCGCA | 59 | 1028 |
| 1245237 | 372 | 387 | 7661 | 7676 | TCACCTGATTTAGAGA | 13 | 1029 |
| 1245263 | 418 | 433 | 8812 | 8827 | GTCCCAGCATTATTCA | 21 | 1030 |
| 1245289 | 445 | 460 | 8839 | 8854 | GTGCTGAGAAGATCGG | 0 | 1031 |
| 1245315 | 489 | 504 | 8883 | 8898 | CTAGGATGTTGACCTC | 0 | 1032 |
| 1245341 | 535 | 550 | 10421 | 10436 | CTCTCCATCATCGATG | 0 | 1033 |
| 1245367 | 595 | 610 | 10481 | 10496 | AGGTAAGGAATCCCTT | 0 | 1034 |
| 1245393 | 650 | 665 | 12068 | 12083 | TGTCAGACCTCTGTGA | 0 | 1035 |
| 1245419 | 725 | 740 | 12143 | 12158 | GAACCCAGTATTCACA | 0 | 1036 |
| 1245445 | 777 | 792 | 15658 | 15673 | CGACTTCATCTGTCTC | 19 | 1037 |
| 1245471 | 805 | 820 | 15686 | 15701 | GTAAGTATTCCATCTA | 45 | 1038 |
| 1245497* | 894 | 909 | 20709 | 20724 | TTAAAATCGCTGAGGC | 67 | 1039 |
| 1245523* | 936 | 951 | 20751 | 20766 | TGTGGCCAACCACTGC | 75 | 1040 |
| 1245549* | 987 | 1002 | 20802 | 20817 | ATCATGCATACATCTC | 62 | 1041 |
| 1245575 | 1075 | 1090 | 20890 | 20905 | GTGCCAAACCAATGTT | 43 | 1042 |
| 1245601 | 1150 | 1165 | 20965 | 20980 | CCTATGAAAAACTACG | 36 | 1043 |
| 1245627 | 1277 | 1292 | 21092 | 21107 | GTATTTACTTTTAGGG | 61 | 1044 |
| 1245653 | 1327 | 1342 | 21142 | 21157 | AATGCTACTTGAACAG | 54 | 1045 |
| 1245679 | 1355 | 1370 | 21170 | 21185 | GATATTCTGTGGCATG | 46 | 1046 |
| 1245705 | 1404 | 1419 | 21219 | 21234 | CCTGCTGAAACTTGAT | 19 | 1047 |
| 1245731 | 1466 | 1481 | 21281 | 21296 | AGAGGCTAGGGAAATC | 63 | 1048 |
| 1245757 | 1517 | 1532 | 21332 | 21347 | AGTAATAAAGTCCAGA | 43 | 1049 |
| 1245783 | 1571 | 1586 | 21386 | 21401 | AATATAGAGGGTCCAC | 7 | 1050 |
| 1245809 | 1630 | 1645 | 21445 | 21460 | TTTAAAATAGAGTCGG | 69 | 1051 |
| 1245835 | 1733 | 1748 | 21548 | 21563 | TTTGAGCCTAAAATTG | 26 | 1052 |
| 1245841 | 1765 | 1780 | 21580 | 21595 | GTACAGTTCCTTTTCC | 47 | 38 |
| 1245861 | 1793 | 1808 | 21608 | 21623 | GGGTCCATTGTTTCTT | 21 | 1053 |
| 1245887 | 2190 | 2205 | 22005 | 22020 | TCTTGATGTAGTGGGA | 44 | 1054 |
| 1245913 | 2352 | 2367 | 22167 | 22182 | TAACTACAAGAGGTTA | 22 | 1055 |
| 1245939 | N/A | N/A | 3507 | 3522 | AACTAACCTGACACAT | 20 | 1056 |
| 1245965 | N/A | N/A | 3674 | 3689 | CCTAAGTTATTATCCC | 18 | 1057 |
| 1245991 | N/A | N/A | 4360 | 4375 | ATACATCAACTCCTCT | 64 | 1058 |
| 1246017 | N/A | N/A | 4650 | 4665 | TCATTTTTAATACGAC | 48 | 1059 |
| 1246043 | N/A | N/A | 5167 | 5182 | TGCATAAGAGCCAAAC | 56 | 1060 |
| 1246065 | N/A | N/A | 5659 | 5674 | ATAAGTTACCAGAGCA | 84 | 48 |
| 1246069 | N/A | N/A | 5663 | 5678 | GAGCATAAGTTACCAG | 61 | 1061 |
| 1246095 | N/A | N/A | 5916 | 5931 | CTTGAATGAGTGGTCT | 64 | 1062 |
| 1246121 | N/A | N/A | 6184 | 6199 | CAATTTACTTTCAGCC | 71 | 1063 |
| 1246147 | N/A | N/A | 6437 | 6452 | AACTAGTGGTAATGGT | 32 | 1064 |
| 1246173 | N/A | N/A | 6741 | 6756 | GCAATGAGATTACCCC | 83 | 1065 |
| 1246199 | N/A | N/A | 7786 | 7801 | ACATAACTACTTCAGT | 28 | 1066 |
| 1246225 | N/A | N/A | 8122 | 8137 | GCTTAGTTCATTGTGA | 45 | 1067 |
| 1246251 | N/A | N/A | 8587 | 8602 | GGGATAAACTGTTCTT | 47 | 1068 |
| 1246277 | N/A | N/A | 8944 | 8959 | TATCTTAAGAGAAGGT | 29 | 1069 |
| 1246303 | N/A | N/A | 9191 | 9206 | ACCCTTAACAAACCTC | 36 | 1070 |
| 1246329 | N/A | N/A | 9430 | 9445 | TAACCAATTATATGAG | 0 | 1071 |
| 1246355 | N/A | N/A | 9636 | 9651 | CTCCGTGTAGTTTGGT | 28 | 1072 |
| 1246381 | N/A | N/A | 9922 | 9937 | GAATTCACTATCTCCC | 38 | 1073 |
| 1246407 | N/A | N/A | 10063 | 10078 | CTTATGATAATTTGGT | 2 | 1074 |
| 1246433 | N/A | N/A | 10389 | 10404 | GATCTTAAGGATCATT | 0 | 1075 |
| 1246459 | N/A | N/A | 11000 | 11015 | TAAATCCAAATCACTC | 39 | 1076 |
| 1246485 | N/A | N/A | 11514 | 11529 | TTTTATTATGAGGATC | 18 | 1077 |
| 1246511 | N/A | N/A | 11857 | 11872 | ATTAAGCAGAATTGTG | 8 | 1078 |
| 1246537 | N/A | N/A | 12205 | 12220 | TTATCATACCACATAC | 19 | 1079 |
| 1246563 | N/A | N/A | 12512 | 12527 | CAAGAGTTCTTGCAGA | 17 | 1080 |
| 1246589 | N/A | N/A | 12692 | 12707 | TCGAATCATTAAGCTT | 34 | 1081 |
| 1246615 | N/A | N/A | 12817 | 12832 | ACCACATAGCTAACTC | 50 | 1082 |
| 1246641 | N/A | N/A | 13769 | 13784 | GCAATAGTACTATAGT | 39 | 1083 |
| 1246667 | N/A | N/A | 13954 | 13969 | CCTCTAAGTTAGCCCC | 97 | 1084 |
| 1246693 | N/A | N/A | 14127 | 14142 | AAATTACTCCGTTCTG | 28 | 1085 |
| 1246719 | N/A | N/A | 14321 | 14336 | TCAAATTAAGATGTCC | 6 | 1086 |
| 1246745 | N/A | N/A | 14499 | 14514 | TGAGAATTTAAGAGGG | 25 | 1087 |
| 1246771 | N/A | N/A | 15217 | 15232 | GTATTCCATAAAGCTG | 10 | 1088 |
| 1246797 | N/A | N/A | 15359 | 15374 | ATGGTAAGGAGTAGTG | 17 | 1089 |
| 1246823 | N/A | N/A | 15495 | 15510 | TGCATTAATGCCACCC | 22 | 1090 |
| 1246849 | N/A | N/A | 16257 | 16272 | GACAGTAGATTTGGTA | 34 | 1091 |
| 1246875 | N/A | N/A | 17043 | 17058 | AAGCTTATCGAGTTTA | 26 | 1092 |
| 1246901 | N/A | N/A | 17989 | 18004 | TAGTATAGTTATCTTC | 28 | 1093 |
| 1246927 | N/A | N/A | 18666 | 18681 | TGGGATACTATTCTCC | 18 | 1094 |
| 1246953 | N/A | N/A | 18873 | 18888 | GGATAAGAAGAGAGCT | 46 | 1095 |
| 1246979 | N/A | N/A | 19550 | 19565 | GATATTGTTTAGCTGA | 59 | 1096 |
| 1247005 | N/A | N/A | 19753 | 19768 | CTGATATGAGTAAAGA | 21 | 1097 |
| 1247031 | N/A | N/A | 20008 | 20023 | GAGAGTAATCAGTTTT | 27 | 1098 |
| 1247057 | N/A | N/A | 20375 | 20390 | AAGTAAGGTAAAGTCT | 20 | 1099 |
| 1247083 | N/A | N/A | 20571 | 20586 | TTTAACTTTCCTCCGT | 16 | 1100 |

TABLE 15
Inhibition of HSD17B13 RNA by 3-10-3 cEt
gapmers targeting SEQ ID NO: 1, and 2

| | SEQ | | SEQ | | | | |
|---|---|---|---|---|---|---|---|
| | ID | SEQ | ID | SEQ | | | |
| | NO: 1 | ID NO: | NO: 2 | ID NO: | | HSD17B13 | SEQ |
| Compound | Start | 1 Stop | Start | 2 Stop | | (% | ID |
| Number | Site | Site | Site | Site | Sequence (5′ to 3′) | Inhibition) | NO |
| 1245082 | 18 | 33 | 3112 | 3127 | TCCTTGTGTAGTCCTA | 61 | 1101 |
| 1245108 | 93 | 108 | 3187 | 3202 | TGATGGTGATCAGAAG | 0 | 1102 |
| 1245134 | 125 | 140 | 3219 | 3234 | AAACTTCACCAACGAC | 27 | 1103 |
| 1245160 | 217 | 232 | 3311 | 3326 | AATTCATAAGTAGTCT | 28 | 1104 |
| 1245186 | 277 | 292 | 7566 | 7581 | GTTTCCTCCACACCGC | 45 | 1105 |
| 1245212 | 324 | 339 | 7613 | 7628 | CCACATACGCATGCGC | 68 | 1106 |
| 1245238 | 373 | 388 | N/A | N/A | TTCACCTGATTTAGAG | 9 | 1107 |
| 1245264 | 419 | 434 | 8813 | 8828 | TGTCCCAGCATTATTC | 31 | 1108 |
| 1245290 | 446 | 461 | 8840 | 8855 | GGTGCTGAGAAGATCG | 33 | 1109 |
| 1245316 | 490 | 505 | 8884 | 8899 | CCTAGGATGTTGACCT | 3 | 1110 |
| 1245342 | 536 | 551 | 10422 | 10437 | TCTCTCCATCATCGAT | 24 | 1111 |
| 1245368 | 596 | 611 | 10482 | 10497 | GAGGTAAGGAATCCCT | 27 | 1112 |
| 1245394 | 651 | 666 | 12069 | 12084 | ATGTCAGACCTCTGTG | 19 | 1113 |
| 1245420 | 726 | 741 | 12144 | 12159 | TGAACCCAGTATTCAC | 10 | 1114 |
| 1245446 | 778 | 793 | 15659 | 15674 | ACGACTTCATCTGTCT | 8 | 1115 |
| 1245472 | 806 | 821 | 15687 | 15702 | GGTAAGTATTCCATCT | 12 | 1116 |
| 1245498* | 895 | 910 | 20710 | 20725 | TTTAAAATCGCTGAGG | 24 | 1117 |
| 1245524* | 937 | 952 | 20752 | 20767 | TTGTGGCCAACCACTG | 83 | 1118 |
| 1245550* | 988 | 1003 | 20803 | 20818 | TATCATGCATACATCT | 45 | 1119 |
| 1245576 | 1076 | 1091 | 20891 | 20906 | AGTGCCAAACCAATGT | 62 | 1120 |
| 1245602 | 1154 | 1169 | 20969 | 20984 | CAGACCTATGAAAAAC | 26 | 1121 |
| 1245628 | 1296 | 1311 | 21111 | 21126 | GTGTAAATAAGTTCTC | 61 | 1122 |
| 1245654 | 1328 | 1343 | 21143 | 21158 | GAATGCTACTTGAACA | 44 | 1123 |
| 1245680 | 1356 | 1371 | 21171 | 21186 | TGATATTCTGTGGCAT | 69 | 1124 |
| 1245706 | 1405 | 1420 | 21220 | 21235 | GCCTGCTGAAACTTGA | 18 | 1125 |
| 1245732 | 1483 | 1498 | 21298 | 21313 | GGGCTAATGAAAAAGG | 14 | 1126 |
| 1245758 | 1520 | 1535 | 21335 | 21350 | TCAAGTAATAAAGTCC | 49 | 1127 |
| 1245784 | 1572 | 1587 | 21387 | 21402 | AAATATAGAGGGTCCA | 0 | 1128 |
| 1245810 | 1631 | 1646 | 21446 | 21461 | ATTTAAAATAGAGTCG | 24 | 1129 |
| 1245836 | 1738 | 1753 | 21553 | 21568 | TAATTTTTGAGCCTAA | 41 | 1130 |
| 1245841 | 1765 | 1780 | 21580 | 21595 | GTACAGTTCCTTTTCC | 55 | 38 |
| 1245862 | 1794 | 1809 | 21609 | 21624 | TGGGTCCATTGTTTCT | 35 | 1131 |
| 1245888 | 2191 | 2206 | 22006 | 22021 | GTCTTGATGTAGTGGG | 67 | 1132 |
| 1245914 | 2353 | 2368 | 22168 | 22183 | ATAACTACAAGAGGTT | 64 | 1133 |
| 1245940 | N/A | N/A | 3508 | 3523 | TAACTAACCTGACACA | 57 | 1134 |
| 1245966 | N/A | N/A | 3675 | 3690 | CCCTAAGTTATTATCC | 25 | 1135 |
| 1245992 | N/A | N/A | 4361 | 4376 | TATACATCAACTCCTC | 39 | 1136 |
| 1246018 | N/A | N/A | 4652 | 4667 | AGTCATTTTTAATACG | 13 | 1137 |
| 1246044 | N/A | N/A | 5168 | 5183 | TTGCATAAGAGCCAAA | 46 | 1138 |
| 1246065 | N/A | N/A | 5659 | 5674 | ATAAGTTACCAGAGCA | 75 | 48 |
| 1246070 | N/A | N/A | 5736 | 5751 | TAGTTGGTAGCTTGCT | 66 | 1139 |
| 1246096 | N/A | N/A | 5918 | 5933 | ACCTTGAATGAGTGGT | 26 | 1140 |
| 1246122 | N/A | N/A | 6185 | 6200 | GCAATTTACTTTCAGC | 66 | 1141 |
| 1246148 | N/A | N/A | 6441 | 6456 | TCTAAACTAGTGGTAA | 24 | 1142 |
| 1246174 | N/A | N/A | 6743 | 6758 | TTGCAATGAGATTACC | 29 | 1143 |
| 1246200 | N/A | N/A | 7787 | 7802 | GACATAACTACTTCAG | 66 | 1144 |
| 1246226 | N/A | N/A | 8133 | 8148 | TTTGTTAGAGTGCTTA | 80 | 1145 |
| 1246252 | N/A | N/A | 8596 | 8611 | CATAAAGGTGGGATAA | 23 | 1146 |
| 1246278 | N/A | N/A | 8945 | 8960 | GTATCTTAAGAGAAGG | 30 | 1147 |
| 1246304 | N/A | N/A | 9208 | 9223 | AAAGATGTACACTGAC | 57 | 1148 |
| 1246330 | N/A | N/A | 9431 | 9446 | CTAACCAATTATATGA | 21 | 1149 |
| 1246356 | N/A | N/A | 9648 | 9663 | AATGTATGAGGTCTCC | 65 | 1150 |
| 1246382 | N/A | N/A | 9926 | 9941 | GATTGAATTCACTATC | 0 | 1151 |
| 1246408 | N/A | N/A | 10064 | 10079 | CCTTATGATAATTTGG | 29 | 1152 |
| 1246434 | N/A | N/A | 10390 | 10405 | TGATCTTAAGGATCAT | 0 | 1153 |
| 1246460 | N/A | N/A | 11030 | 11045 | CATTCTAAACTACTAT | 11 | 1154 |
| 1246486 | N/A | N/A | 11542 | 11557 | GACAATGGTTGCCACT | 63 | 1155 |
| 1246512 | N/A | N/A | 11858 | 11873 | GATTAAGCAGAATTGT | 37 | 1156 |
| 1246538 | N/A | N/A | 12209 | 12224 | CAATTTATCATACCAC | 37 | 1157 |
| 1246564 | N/A | N/A | 12513 | 12528 | ACAAGAGTTCTTGCAG | 29 | 1158 |
| 1246590 | N/A | N/A | 12693 | 12708 | TTCGAATCATTAAGCT | 63 | 1159 |
| 1246616 | N/A | N/A | 12862 | 12877 | CACCATGAAGGACTCC | 48 | 1160 |
| 1246642 | N/A | N/A | 13770 | 13785 | TGCAATAGTACTATAG | 24 | 1161 |
| 1246668 | N/A | N/A | 13975 | 13990 | ATTTAGCATTGCCTGT | 10 | 1162 |
| 1246694 | N/A | N/A | 14128 | 14143 | TAAATTACTCCGTTCT | 36 | 1163 |
| 1246720 | N/A | N/A | 14362 | 14377 | GTGCAAGATGATGACA | 19 | 1164 |
| 1246746 | N/A | N/A | 14541 | 14556 | GTATTTGAGATTCACC | 41 | 1165 |
| 1246772 | N/A | N/A | 15244 | 15259 | GCTAAGTATACTTTCT | 37 | 1166 |
| 1246798 | N/A | N/A | 15360 | 15375 | GATGGTAAGGAGTAGT | 28 | 1167 |
| 1246824 | N/A | N/A | 15496 | 15511 | CTGCATTAATGCCACC | 67 | 1168 |
| 1246850 | N/A | N/A | 16272 | 16287 | CAAAGTTTGGGCAGAG | 44 | 1169 |
| 1246876 | N/A | N/A | 17046 | 17061 | AAAAAGCTTATCGAGT | 8 | 1170 |
| 1246902 | N/A | N/A | 17991 | 18006 | GTTAGTATAGTTATCT | 66 | 1171 |
| 1246928 | N/A | N/A | 18671 | 18686 | TTTACTGGGATACTAT | 25 | 1172 |
| 1246954 | N/A | N/A | 18901 | 18916 | AGGGAAGATCTGGCTG | 4 | 1173 |
| 1246980 | N/A | N/A | 19563 | 19578 | AGCTATTGTCTTTGAT | 39 | 1174 |
| 1247006 | N/A | N/A | 19760 | 19775 | CTCTTATCTGATATGA | 7 | 1175 |
| 1247032 | N/A | N/A | 20037 | 20052 | GCATTAAAACTCTCAT | 35 | 1176 |
| 1247058 | N/A | N/A | 20376 | 20391 | CAAGTAAGGTAAAGTC | 33 | 1177 |
| 1247084 | N/A | N/A | 20572 | 20587 | GTTTAACTTTCCTCCG | 30 | 1178 |

TABLE 16
Inhibition of HSD17B13 RNA by 3-10-3 cEt gapmers targeting SEQ ID NO: 1, and 2

| | SEQ | SEQ | SEQ | SEQ | | | |
|---|---|---|---|---|---|---|---|
| | ID NO: | ID NO: | ID NO: | ID NO: | | | |
| | 1 | 1 | 2 | 2 | | HSD17B13 | SEQ |
| Compound | Start | Stop | Start | Stop | | (% | ID |
| Number | Site | Site | Site | Site | Sequence (5′ to 3′) | Inhibition) | NO |
| 1245083 | 19 | 34 | 3113 | 3128 | GTCCTTGTGTAGTCCT | 62 | 1179 |
| 1245109 | 98 | 113 | 3192 | 3207 | GTAGATGATGGTGATC | 36 | 1180 |
| 1245135 | 126 | 141 | 3220 | 3235 | AAAACTTCACCAACGA | 29 | 1181 |
| 1245161 | 240 | 255 | 3334 | 3349 | CCAATATGCTCTGTCG | 65 | 1182 |
| 1245187 | 278 | 293 | 7567 | 7582 | AGTTTCCTCCACACCG | 28 | 1183 |
| 1245213 | 325 | 340 | 7614 | 7629 | ACCACATACGCATGCG | 45 | 1184 |
| 1245239 | 374 | 389 | N/A | N/A | CTTCACCTGATTTAGA | 7 | 1185 |
| 1245265 | 421 | 436 | 8815 | 8830 | ACTGTCCCAGCATTAT | 40 | 1186 |
| 1245291 | 452 | 467 | 8846 | 8861 | ATCCTTGGTGCTGAGA | 13 | 1187 |
| 1245317 | 491 | 506 | 8885 | 8900 | TCCTAGGATGTTGACC | 0 | 1188 |
| 1245343 | 537 | 552 | 10423 | 10438 | TTCTCTCCATCATCGA | 35 | 1189 |
| 1245369 | 597 | 612 | 10483 | 10498 | TGAGGTAAGGAATCCC | 2 | 1190 |
| 1245395 | 652 | 667 | 12070 | 12085 | GATGTCAGACCTCTGT | 6 | 1191 |
| 1245421 | 727 | 742 | 12145 | 12160 | GTGAACCCAGTATTCA | 1 | 1192 |
| 1245447 | 779 | 794 | 15660 | 15675 | TACGACTTCATCTGTC | 29 | 1193 |
| 1245473 | 807 | 822 | 15688 | 15703 | TGGTAAGTATTCCATC | 26 | 1194 |
| 1245499* | 896 | 911 | 20711 | 20726 | ATTTAAAATCGCTGAG | 30 | 1195 |
| 1245525* | 938 | 953 | 20753 | 20768 | TTTGTGGCCAACCACT | 88 | 1196 |
| 1245551* | 989 | 1004 | 20804 | 20819 | TTATCATGCATACATC | 52 | 1197 |
| 1245577 | 1077 | 1092 | 20892 | 20907 | TAGTGCCAAACCAATG | 46 | 1198 |
| 1245603 | 1180 | 1195 | 20995 | 21010 | GTTTTTAAGAGGCATG | 63 | 1199 |
| 1245629 | 1298 | 1313 | 21113 | 21128 | CTGTGTAAATAAGTTC | 38 | 1200 |
| 1245655 | 1329 | 1344 | 21144 | 21159 | GGAATGCTACTTGAAC | 63 | 1201 |
| 1245681 | 1357 | 1372 | 21172 | 21187 | TTGATATTCTGTGGCA | 87 | 1202 |
| 1245707 | 1406 | 1421 | 21221 | 21236 | TGCCTGCTGAAACTTG | 31 | 1203 |
| 1245733 | 1488 | 1503 | 21303 | 21318 | GTTTTGGGCTAATGAA | 54 | 1204 |
| 1245759 | 1538 | 1553 | 21353 | 21368 | GTTATACAGAAGACAG | 54 | 1205 |
| 1245785 | 1573 | 1588 | 21388 | 21403 | GAAATATAGAGGGTCC | 22 | 1206 |
| 1245811 | 1654 | 1669 | 21469 | 21484 | GGGCTAGAACTTAAAA | 35 | 1207 |
| 1245837 | 1742 | 1757 | 21557 | 21572 | GCTTTAATTTTTGAGC | 26 | 1208 |
| 1245863 | 1795 | 1810 | 21610 | 21625 | TTGGGTCCATTGTTTC | 44 | 1209 |
| 1245889 | 2192 | 2207 | 22007 | 22022 | AGTCTTGATGTAGTGG | 63 | 1210 |
| 1245915 | 2354 | 2369 | 22169 | 22184 | TATAACTACAAGAGGT | 46 | 1211 |
| 1245941 | N/A | N/A | 3509 | 3524 | CTAACTAACCTGACAC | 23 | 1212 |
| 1245967 | N/A | N/A | 3703 | 3718 | TAATTTTCAGATCCCG | 75 | 1213 |
| 1245993 | N/A | N/A | 4362 | 4377 | ATATACATCAACTCCT | 43 | 1214 |
| 1246019 | N/A | N/A | 4991 | 5006 | GAATTTTTGAGGTTGG | 77 | 1215 |
| 1246045 | N/A | N/A | 5173 | 5188 | TTAGATTGCATAAGAG | 61 | 1216 |
| 1246071 | N/A | N/A | 5738 | 5753 | TTTAGTTGGTAGCTTG | 63 | 1217 |
| 1246097 | N/A | N/A | 5919 | 5934 | AACCTTGAATGAGTGG | 50 | 1218 |
| 1246123 | N/A | N/A | 6204 | 6219 | CATAGGACATGGAGAC | 69 | 1219 |
| 1246149 | N/A | N/A | 6443 | 6458 | ATTCTAAACTAGTGGT | 39 | 1220 |
| 1246175 | N/A | N/A | 6784 | 6799 | CTCCTTATTTGTTAGA | 26 | 1221 |
| 1246201 | N/A | N/A | 7788 | 7803 | TGACATAACTACTTCA | 22 | 1222 |
| 1246227 | N/A | N/A | 8137 | 8152 | AAAGTTTGTTAGAGTG | 75 | 1223 |
| 1246253 | N/A | N/A | 8597 | 8612 | TCATAAAGGTGGGATA | 40 | 1224 |
| 1246279 | N/A | N/A | 8959 | 8974 | GTTATAAGTTTCATGT | 21 | 1225 |
| 1246305 | N/A | N/A | 9215 | 9230 | GCATTGAAAAGATGTA | 0 | 1226 |
| 1246331 | N/A | N/A | 9476 | 9491 | TCTATACAAAGGCAGT | 53 | 1227 |
| 1246357 | N/A | N/A | 9649 | 9664 | TAATGTATGAGGTCTC | 51 | 1228 |
| 1246383 | N/A | N/A | 9928 | 9943 | ATGATTGAATTCACTA | 33 | 1229 |
| 1246409 | N/A | N/A | 10112 | 10127 | TAAACAATATTAAGGG | 0 | 1230 |
| 1246435 | N/A | N/A | 10494 | 10509 | CCAATATGGGATGAGG | 60 | 1231 |
| 1246461 | N/A | N/A | 11074 | 11089 | TTACAACCTGGTTTCA | 25 | 1232 |
| 1246487 | N/A | N/A | 11543 | 11558 | TGACAATGGTTGCCAC | 40 | 1233 |
| 1246513 | N/A | N/A | 11859 | 11874 | TGATTAAGCAGAATTG | 57 | 1234 |
| 1246539 | N/A | N/A | 12210 | 12225 | TCAATTTATCATACCA | 26 | 1235 |
| 1246565 | N/A | N/A | 12514 | 12529 | GACAAGAGTTCTTGCA | 22 | 1236 |
| 1246591 | N/A | N/A | 12694 | 12709 | TTTCGAATCATTAAGC | 30 | 1237 |
| 1246617 | N/A | N/A | 12875 | 12890 | ACCTATGGTCTAACAC | 14 | 1238 |
| 1246643 | N/A | N/A | 13771 | 13786 | TTGCAATAGTACTATA | 3 | 1239 |
| 1246669 | N/A | N/A | 13976 | 13991 | TATTTAGCATTGCCTG | 12 | 1240 |
| 1246695 | N/A | N/A | 14129 | 14144 | CTAAATTACTCCGTTC | 20 | 1241 |
| 1246721 | N/A | N/A | 14377 | 14392 | TAGAATTGTCTGTTAG | 9 | 1242 |
| 1246747 | N/A | N/A | 14542 | 14557 | CGTATTTGAGATTCAC | 59 | 1243 |
| 1246773 | N/A | N/A | 15245 | 15260 | AGCTAAGTATACTTTC | 18 | 1244 |
| 1246799 | N/A | N/A | 15361 | 15376 | AGATGGTAAGGAGTAG | 26 | 1245 |
| 1246825 | N/A | N/A | 15511 | 15526 | ATATTCCAGGATTTGC | 26 | 1246 |
| 1246851 | N/A | N/A | 16273 | 16288 | GCAAAGTTTGGGCAGA | 50 | 1247 |
| 1246877 | N/A | N/A | 17047 | 17062 | AAAAAAGCTTATCGAG | 7 | 1248 |
| 1246903 | N/A | N/A | 17992 | 18007 | AGTTAGTATAGTTATC | 74 | 1249 |
| 1246929 | N/A | N/A | 18695 | 18710 | AAAGACTTTGAGACTC | 68 | 1250 |
| 1246955 | N/A | N/A | 18925 | 18940 | GAAAGATGGAATGAGC | 54 | 1251 |
| 1246981 | N/A | N/A | 19588 | 19603 | AGGTAAACTAAAGTAC | 6 | 1252 |
| 1247007 | N/A | N/A | 19778 | 19793 | CATACCACTCTTCTCA | 24 | 1253 |
| 1247033 | N/A | N/A | 20039 | 20054 | ATGCATTAAAACTCTC | 12 | 1254 |
| 1247059 | N/A | N/A | 20377 | 20392 | ACAAGTAAGGTAAAGT | 38 | 1255 |
| 1247085 | N/A | N/A | 20589 | 20604 | AGAGTTATCTGGTTTG | 56 | 1256 |

TABLE 17
Inhibition of HSD17B13 RNA by 3-10-3 cEt gapmers targeting SEQ ID NO: 1, and 2

| | SEQ | SEQ | SEQ | SEQ | | | |
|---|---|---|---|---|---|---|---|
| | ID NO: | ID NO: | ID NO: | ID NO: | | | |
| | 1 | 1 | 2 | 2 | | HSD17B13 | SEQ |
| Compound | Start | Stop | Start | Stop | | (% | ID |
| Number | Site | Site | Site | Site | Sequence (5′ to 3′) | Inhibition) | NO |
| 1245084 | 20 | 35 | 3114 | 3129 | AGTCCTTGTGTAGTCC | 64 | 1257 |
| 1245110 | 100 | 115 | 3194 | 3209 | GAGTAGATGATGGTGA | 28 | 1258 |
| 1245136 | 127 | 142 | 3221 | 3236 | AAAAACTTCACCAACG | 8 | 1259 |
| 1245162 | 241 | 256 | 3335 | 3350 | ACCAATATGCTCTGTC | 67 | 1260 |
| 1245188 | 289 | 304 | 7578 | 7593 | CACTCAGCTGCAGTTT | 13 | 1261 |
| 1245214 | 326 | 341 | 7615 | 7630 | TACCACATACGCATGC | 33 | 1262 |
| 1245240 | 375 | 390 | N/A | N/A | TCTTCACCTGATTTAG | 24 | 1263 |
| 1245266 | 422 | 437 | 8816 | 8831 | TACTGTCCCAGCATTA | 21 | 1264 |
| 1245292 | 453 | 468 | 8847 | 8862 | CATCCTTGGTGCTGAG | 12 | 1265 |
| 1245318 | 492 | 507 | 8886 | 8901 | GTCCTAGGATGTTGAC | 1 | 1266 |
| 1245344 | 538 | 553 | 10424 | 10439 | TTTCTCTCCATCATCG | 27 | 1267 |
| 1245370 | 598 | 613 | 10484 | 10499 | ATGAGGTAAGGAATCC | 0 | 1268 |
| 1245396 | 654 | 669 | 12072 | 12087 | CTGATGTCAGACCTCT | 35 | 1269 |
| 1245422 | 728 | 743 | 12146 | 12161 | GGTGAACCCAGTATTC | 7 | 1270 |
| 1245448 | 780 | 795 | 15661 | 15676 | TTACGACTTCATCTGT | 36 | 1271 |
| 1245474 | 810 | 825 | 15691 | 15706 | TATTGGTAAGTATTCC | 67 | 1272 |
| 1245500* | 897 | 912 | 20712 | 20727 | GATTTAAAATCGCTGA | 49 | 1273 |
| 1245526* | 939 | 954 | 20754 | 20769 | TTTTGTGGCCAACCAC | 77 | 1274 |
| 1245552* | 992 | 1007 | 20807 | 20822 | TCATTATCATGCATAC | 67 | 1275 |
| 1245578 | 1078 | 1093 | 20893 | 20908 | CTAGTGCCAAACCAAT | 49 | 1276 |
| 1245604 | 1183 | 1198 | 20998 | 21013 | GAAGTTTTTAAGAGGC | 64 | 1277 |
| 1245630 | 1299 | 1314 | 21114 | 21129 | CCTGTGTAAATAAGTT | 18 | 1278 |
| 1245656 | 1331 | 1346 | 21146 | 21161 | TTGGAATGCTACTTGA | 72 | 1279 |
| 1245682 | 1358 | 1373 | 21173 | 21188 | GTTGATATTCTGTGGC | 80 | 1280 |
| 1245708 | 1408 | 1423 | 21223 | 21238 | GCTGCCTGCTGAAACT | 38 | 1281 |
| 1245734 | 1489 | 1504 | 21304 | 21319 | CGTTTTGGGCTAATGA | 48 | 1282 |
| 1245760 | 1540 | 1555 | 21355 | 21370 | GAGTTATACAGAAGAC | 61 | 1283 |
| 1245786 | 1574 | 1589 | 21389 | 21404 | GGAAATATAGAGGGTC | 50 | 1284 |
| 1245812 | 1668 | 1683 | 21483 | 21498 | AAAAGGTTATCATGGG | 49 | 1285 |
| 1245838 | 1750 | 1765 | 21565 | 21580 | CTGTGTTAGCTTTAAT | 67 | 1286 |
| 1245841 | 1765 | 1780 | 21580 | 21595 | GTACAGTTCCTTTTCC | 61 | 38 |
| 1245864 | 1796 | 1811 | 21611 | 21626 | CTTGGGTCCATTGTTT | 44 | 1287 |
| 1245890 | 2193 | 2208 | 22008 | 22023 | TAGTCTTGATGTAGTG | 55 | 1288 |
| 1245916 | 2355 | 2370 | 22170 | 22185 | TTATAACTACAAGAGG | 68 | 1289 |
| 1245942 | N/A | N/A | 3511 | 3526 | ATCTAACTAACCTGAC | 0 | 1290 |
| 1245968 | N/A | N/A | 3704 | 3719 | GTAATTTTCAGATCCC | 82 | 1291 |
| 1245994 | N/A | N/A | 4363 | 4378 | TATATACATCAACTCC | 61 | 1292 |
| 1246020 | N/A | N/A | 5029 | 5044 | GCTTAAATGTTTAACC | 67 | 1293 |
| 1246046 | N/A | N/A | 5175 | 5190 | GTTTAGATTGCATAAG | 46 | 1294 |
| 1246065 | N/A | N/A | 5659 | 5674 | ATAAGTTACCAGAGCA | 88 | 48 |
| 1246072 | N/A | N/A | 5739 | 5754 | ATTTAGTTGGTAGCTT | 35 | 1295 |
| 1246098 | N/A | N/A | 5920 | 5935 | AAACCTTGAATGAGTG | 37 | 1296 |
| 1246124 | N/A | N/A | 6205 | 6220 | CCATAGGACATGGAGA | 68 | 1297 |
| 1246150 | N/A | N/A | 6444 | 6459 | AATTCTAAACTAGTGG | 31 | 1298 |
| 1246176 | N/A | N/A | 6795 | 6810 | TAAAAATTGGCCTCCT | 29 | 1299 |
| | | | 7104 | 7119 | | | |
| 1246202 | N/A | N/A | 7804 | 7819 | ATATATCCTTCCTTGG | 20 | 1300 |
| 1246228 | N/A | N/A | 8139 | 8154 | GTAAAGTTTGTTAGAG | 54 | 1301 |
| 1246254 | N/A | N/A | 8598 | 8613 | GTCATAAAGGTGGGAT | 28 | 1302 |
| 1246280 | N/A | N/A | 8960 | 8975 | CGTTATAAGTTTCATG | 33 | 1303 |
| 1246306 | N/A | N/A | 9256 | 9271 | AATCATGGTGTGGAGG | 11 | 1304 |
| 1246332 | N/A | N/A | 9497 | 9512 | GGAAGATTAATCATAA | 32 | 1305 |
| 1246358 | N/A | N/A | 9650 | 9665 | CTAATGTATGAGGTCT | 46 | 1306 |
| 1246384 | N/A | N/A | 9937 | 9952 | TAATGAATCATGATTG | 2 | 1307 |
| 1246410 | N/A | N/A | 10145 | 10160 | GAATCAAATAGATCCT | 46 | 1308 |
| 1246436 | N/A | N/A | 10495 | 10510 | ACCAATATGGGATGAG | 24 | 1309 |
| 1246462 | N/A | N/A | 11078 | 11093 | ATAATTACAACCTGGT | 44 | 1310 |
| 1246488 | N/A | N/A | 11547 | 11562 | CTCTTGACAATGGTTG | 50 | 1311 |
| | | | 11572 | 11587 | | | |
| 1246514 | N/A | N/A | 11861 | 11876 | CATGATTAAGCAGAAT | 42 | 1312 |
| 1246540 | N/A | N/A | 12211 | 12226 | ATCAATTTATCATACC | 11 | 1313 |
| 1246566 | N/A | N/A | 12515 | 12530 | AGACAAGAGTTCTTGC | 30 | 1314 |
| 1246592 | N/A | N/A | 12701 | 12716 | AAATTGGTTTCGAATC | 32 | 1315 |
| 1246618 | N/A | N/A | 12889 | 12904 | CTTTAGTCAACAGTAC | 12 | 1316 |
| 1246644 | N/A | N/A | 13783 | 13798 | AACAATCAGGAGTTGC | 31 | 1317 |
| 1246670 | N/A | N/A | 13997 | 14012 | CTCTATAAAATCAATC | 0 | 1318 |
| 1246696 | N/A | N/A | 14130 | 14145 | TCTAAATTACTCCGTT | 15 | 1319 |
| 1246722 | N/A | N/A | 14378 | 14393 | GTAGAATTGTCTGTTA | 51 | 1320 |
| 1246748 | N/A | N/A | 14556 | 14571 | TCCGGTAAGAATTTCG | 63 | 1321 |
| 1246774 | N/A | N/A | 15246 | 15261 | TAGCTAAGTATACTTT | 10 | 1322 |
| 1246800 | N/A | N/A | 15364 | 15379 | ATTAGATGGTAAGGAG | 4 | 1323 |
| 1246826 | N/A | N/A | 15570 | 15585 | GTAAATGATGGCAGGA | 34 | 1324 |
| 1246852 | N/A | N/A | 16274 | 16289 | AGCAAAGTTTGGGCAG | 44 | 1325 |
| 1246878 | N/A | N/A | 17077 | 17092 | AAATTAGAGGCCCAGG | 43 | 1326 |
| 1246904 | N/A | N/A | 17994 | 18009 | GAAGTTAGTATAGTTA | 59 | 1327 |
| 1246930 | N/A | N/A | 18732 | 18747 | CTAGTTACAAACCACC | 43 | 1328 |
| 1246956 | N/A | N/A | 18958 | 18973 | AGATTTACTTCCTTGT | 41 | 1329 |
| 1246982 | N/A | N/A | 19590 | 19605 | TAAGGTAAACTAAAGT | 9 | 1330 |
| 1247008 | N/A | N/A | 19781 | 19796 | ATACATACCACTCTTC | 18 | 1331 |
| 1247034 | N/A | N/A | 20087 | 20102 | AGTAACTTTATTAACG | 12 | 1332 |
| 1247060 | N/A | N/A | 20381 | 20396 | AATCACAAGTAAGGTA | 52 | 1333 |
| 1247086 | N/A | N/A | 20599 | 20614 | GAATACGCTGAGAGTT | 11 | 1334 |

TABLE 18
Inhibition of HSD17B13 RNA by 3-10-3 cEt gapmers targeting SEQ ID NO: 1, and 2

| | SEQ | SEQ | SEQ | SEQ | | | |
|---|---|---|---|---|---|---|---|
| | ID NO: | ID NO: | ID NO: | ID NO: | | | |
| | 1 | 1 | 2 | 2 | | HSD17B13 | SEQ |
| Compound | Start | Stop | Start | Stop | | (% | ID |
| Number | Site | Site | Site | Site | Sequence (5′ to 3′) | Inhibition) | NO |
| 1245085 | 21 | 36 | 3115 | 3130 | CAGTCCTTGTGTAGTC | 70 | 1335 |
| 1245111 | 101 | 116 | 3195 | 3210 | GGAGTAGATGATGGTG | 31 | 1336 |
| 1245137 | 154 | 169 | 3248 | 3263 | GCCACAGATTTTCTCC | 49 | 1337 |
| 1245163 | 242 | 257 | 3336 | 3351 | AACCAATATGCTCTGT | 51 | 1338 |
| 1245189 | 290 | 305 | 7579 | 7594 | GCACTCAGCTGCAGTT | 29 | 1339 |
| 1245215 | 327 | 342 | 7616 | 7631 | CTACCACATACGCATG | 25 | 1340 |
| 1245241 | 392 | 407 | 8786 | 8801 | TACATCACCCACTTCT | 37 | 1341 |
| 1245267 | 423 | 438 | 8817 | 8832 | ATACTGTCCCAGCATT | 32 | 1342 |
| 1245293 | 454 | 469 | 8848 | 8863 | TCATCCTTGGTGCTGA | 12 | 1343 |
| 1245319 | 493 | 508 | 8887 | 8902 | TGTCCTAGGATGTTGA | 41 | 1344 |
| 1245345 | 548 | 563 | 10434 | 10449 | GTGGCCATGATTTCTC | 40 | 1345 |
| 1245371 | 599 | 614 | 10485 | 10500 | GATGAGGTAAGGAATC | 0 | 1346 |
| 1245397 | 655 | 670 | 12073 | 12088 | TCTGATGTCAGACCTC | 42 | 1347 |
| 1245423 | 729 | 744 | 12147 | 12162 | TGGTGAACCCAGTATT | 0 | 1348 |
| 1245449 | 781 | 796 | 15662 | 15677 | CTTACGACTTCATCTG | 38 | 1349 |
| 1245475 | 812 | 827 | 15693 | 15708 | CTTATTGGTAAGTATT | 22 | 1350 |
| 1245501* | 898 | 913 | 20713 | 20728 | CGATTTAAAATCGCTG | 40 | 1351 |
| 1245527* | 940 | 955 | 20755 | 20770 | ATTTTGTGGCCAACCA | 59 | 1352 |
| 1245553 | 996 | 1011 | 20811 | 20826 | CATATCATTATCATGC | 66 | 1353 |
| 1245579 | 1079 | 1094 | 20894 | 20909 | GCTAGTGCCAAACCAA | 70 | 1354 |
| 1245605 | 1192 | 1207 | 21007 | 21022 | GTAAGCACAGAAGTTT | 55 | 1355 |
| 1245631 | 1300 | 1315 | 21115 | 21130 | CCCTGTGTAAATAAGT | 41 | 1356 |
| 1245657 | 1332 | 1347 | 21147 | 21162 | ATTGGAATGCTACTTG | 53 | 1357 |
| 1245683 | 1359 | 1374 | 21174 | 21189 | TGTTGATATTCTGTGG | 68 | 1358 |
| 1245709 | 1412 | 1427 | 21227 | 21242 | TAAAGCTGCCTGCTGA | 44 | 1359 |
| 1245735 | 1490 | 1505 | 21305 | 21320 | CCGTTTTGGGCTAATG | 58 | 1360 |
| 1245761 | 1545 | 1560 | 21360 | 21375 | CTTCAGAGTTATACAG | 35 | 1361 |
| 1245787 | 1575 | 1590 | 21390 | 21405 | AGGAAATATAGAGGGT | 54 | 1362 |
| 1245813 | 1670 | 1685 | 21485 | 21500 | GAAAAAGGTTATCATG | 31 | 1363 |
| 1245839 | 1751 | 1766 | 21566 | 21581 | CCTGTGTTAGCTTTAA | 67 | 1364 |
| 1245841 | 1765 | 1780 | 21580 | 21595 | GTACAGTTCCTTTTCC | 58 | 38 |
| 1245865 | 1797 | 1812 | 21612 | 21627 | TCTTGGGTCCATTGTT | 60 | 1365 |
| 1245891 | 2194 | 2209 | 22009 | 22024 | TTAGTCTTGATGTAGT | 61 | 1366 |
| 1245917 | 2378 | 2393 | 22193 | 22208 | GTTTAGAAGTCAAACG | 0 | 1367 |
| 1245943 | N/A | N/A | 3512 | 3527 | CATCTAACTAACCTGA | 0 | 1368 |
| 1245969 | N/A | N/A | 3750 | 3765 | TAAAGGTTTCTGTTGC | 66 | 1369 |
| 1245995 | N/A | N/A | 4405 | 4420 | ATTCGAATTTCTTCAA | 65 | 1370 |
| 1246021 | N/A | N/A | 5042 | 5057 | GAATCATTCAGTAGCT | 65 | 1371 |
| 1246047 | N/A | N/A | 5177 | 5192 | CAGTTTAGATTGCATA | 60 | 1372 |
| 1246065 | N/A | N/A | 5659 | 5674 | ATAAGTTACCAGAGCA | 85 | 48 |
| 1246073 | N/A | N/A | 5740 | 5755 | GATTTAGTTGGTAGCT | 63 | 1373 |
| 1246099 | N/A | N/A | 5921 | 5936 | CAAACCTTGAATGAGT | 53 | 1374 |
| 1246125 | N/A | N/A | 6206 | 6221 | ACCATAGGACATGGAG | 62 | 1375 |
| 1246151 | N/A | N/A | 6445 | 6460 | TAATTCTAAACTAGTG | 11 | 1376 |
| 1246177 | N/A | N/A | 6796 | 6811 | ATAAAAATTGGCCTCC | 41 | 1377 |
| 1246203 | N/A | N/A | 7828 | 7843 | TGGATTACATACAAGA | 68 | 1378 |
| 1246229 | N/A | N/A | 8140 | 8155 | TGTAAAGTTTGTTAGA | 35 | 1379 |
| 1246255 | N/A | N/A | 8599 | 8614 | TGTCATAAAGGTGGGA | 48 | 1380 |
| 1246281 | N/A | N/A | 8961 | 8976 | CCGTTATAAGTTTCAT | 54 | 1381 |
| 1246307 | N/A | N/A | 9257 | 9272 | AAATCATGGTGTGGAG | 1 | 1382 |
| 1246333 | N/A | N/A | 9499 | 9514 | CTGGAAGATTAATCAT | 31 | 1383 |
| 1246359 | N/A | N/A | 9652 | 9667 | AGCTAATGTATGAGGT | 56 | 1384 |
| 1246385 | N/A | N/A | 9938 | 9953 | CTAATGAATCATGATT | 20 | 1385 |
| 1246411 | N/A | N/A | 10180 | 10195 | CTAATCTCAGTACTCC | 53 | 1386 |
| 1246437 | N/A | N/A | 10496 | 10511 | TACCAATATGGGATGA | 1 | 1387 |
| 1246463 | N/A | N/A | 11079 | 11094 | TATAATTACAACCTGG | 46 | 1388 |
| 1246489 | N/A | N/A | 11548 | 11563 | TCTCTTGACAATGGTT | 70 | 1389 |
| | | | 11573 | 11588 | | | |
| 1246515 | N/A | N/A | 11865 | 11880 | CTTACATGATTAAGCA | 44 | 1390 |
| 1246541 | N/A | N/A | 12238 | 12253 | GCCTAAACATTTCTCA | 2 | 1391 |
| 1246567 | N/A | N/A | 12516 | 12531 | GAGACAAGAGTTCTTG | 19 | 1392 |
| 1246593 | N/A | N/A | 12703 | 12718 | AAAAATTGGTTTCGAA | 13 | 1393 |
| 1246619 | N/A | N/A | 13551 | 13566 | CTCTCTAAAGGGCTGC | 55 | 1394 |
| 1246645 | N/A | N/A | 13813 | 13828 | TTTTATTGGGCCCAAT | 18 | 1395 |
| 1246671 | N/A | N/A | 14007 | 14022 | ATCTAGCAACCTCTAT | 12 | 1396 |
| 1246697 | N/A | N/A | 14131 | 14146 | TTCTAAATTACTCCGT | 53 | 1397 |
| 1246723 | N/A | N/A | 14380 | 14395 | GTGTAGAATTGTCTGT | 42 | 1398 |
| 1246749 | N/A | N/A | 14557 | 14572 | TTCCGGTAAGAATTTC | 33 | 1399 |
| 1246775 | N/A | N/A | 15248 | 15263 | TATAGCTAAGTATACT | 23 | 1400 |
| 1246801 | N/A | N/A | 15365 | 15380 | CATTAGATGGTAAGGA | 32 | 1401 |
| 1246827 | N/A | N/A | 15571 | 15586 | AGTAAATGATGGCAGG | 40 | 1402 |
| 1246853 | N/A | N/A | 16287 | 16302 | TAGAATAGTCTTCAGC | 70 | 1403 |
| 1246879 | N/A | N/A | 17135 | 17150 | AATAGCCATGTAGCTA | 28 | 1404 |
| 1246905 | N/A | N/A | 17995 | 18010 | TGAAGTTAGTATAGTT | 43 | 1405 |
| 1246931 | N/A | N/A | 18733 | 18748 | CCTAGTTACAAACCAC | 51 | 1406 |
| 1246957 | N/A | N/A | 18962 | 18977 | TGCAAGATTTACTTCC | 45 | 1407 |
| 1246983 | N/A | N/A | 19598 | 19613 | CTCTATAATAAGGTAA | 0 | 1408 |
| 1247009 | N/A | N/A | 19782 | 19797 | GATACATACCACTCTT | 52 | 1409 |
| 1247035 | N/A | N/A | 20110 | 20125 | CAAGACATTCTAGCCT | 58 | 1410 |
| 1247061 | N/A | N/A | 20383 | 20398 | GTAATCACAAGTAAGG | 70 | 1411 |
| 1247087 | N/A | N/A | 20600 | 20615 | AGAATACGCTGAGAGT | 56 | 1412 |

TABLE 19
Inhibition of HSD17B13 RNA by 3-10-3 cEt gapmers targeting SEQ ID NO: 1, and 2

| | SEQ | SEQ | SEQ | SEQ | | | |
|---|---|---|---|---|---|---|---|
| | ID NO: | ID NO: | ID NO: | ID NO: | | | |
| | 1 | 1 | 2 | 2 | | HSD17B13 | SEQ |
| Compound | Start | Stop | Start | Stop | | (% | ID |
| Number | Site | Site | Site | Site | Sequence (5′ to 3′) | Inhibition) | NO |
| 1245086 | 22 | 37 | 3116 | 3131 | TCAGTCCTTGTGTAGT | 72 | 1413 |
| 1245112 | 103 | 118 | 3197 | 3212 | TAGGAGTAGATGATGG | 15 | 1414 |
| 1245138 | 166 | 181 | 3260 | 3275 | ACAATCTCCCCAGCCA | 67 | 1415 |
| 1245164 | 243 | 258 | 3337 | 3352 | GAACCAATATGCTCTG | 61 | 1416 |
| 1245190 | 291 | 306 | 7580 | 7595 | GGCACTCAGCTGCAGT | 49 | 1417 |
| 1245216 | 328 | 343 | 7617 | 7632 | TCTACCACATACGCAT | 55 | 1418 |
| 1245242 | 393 | 408 | 8787 | 8802 | TTACATCACCCACTTC | 37 | 1419 |
| 1245268 | 424 | 439 | 8818 | 8833 | TATACTGTCCCAGCAT | 40 | 1420 |
| 1245294 | 456 | 471 | 8850 | 8865 | CTTCATCCTTGGTGCT | 30 | 1421 |
| 1245320 | 494 | 509 | 8888 | 8903 | ATGTCCTAGGATGTTG | 50 | 1422 |
| 1245346 | 551 | 566 | 10437 | 10452 | GATGTGGCCATGATTT | 9 | 1423 |
| 1245372 | 606 | 621 | 10492 | 10507 | AATATGGGATGAGGTA | 53 | 1424 |
| 1245398 | 656 | 671 | 12074 | 12089 | TTCTGATGTCAGACCT | 42 | 1425 |
| 1245424 | 730 | 745 | 12148 | 12163 | TTGGTGAACCCAGTAT | 31 | 1426 |
| 1245450 | 782 | 797 | 15663 | 15678 | TCTTACGACTTCATCT | 34 | 1427 |
| 1245476 | 813 | 828 | 15694 | 15709 | TCTTATTGGTAAGTAT | 25 | 1428 |
| 1245502* | 899 | 914 | 20714 | 20729 | ACGATTTAAAATCGCT | 44 | 1429 |
| 1245528* | 941 | 956 | 20756 | 20771 | GATTTTGTGGCCAACC | 91 | 1430 |
| 1245554 | 1006 | 1021 | 20821 | 20836 | CGAAACTATTCATATC | 66 | 1431 |
| 1245580 | 1080 | 1095 | 20895 | 20910 | TGCTAGTGCCAAACCA | 78 | 1432 |
| 1245606 | 1198 | 1213 | 21013 | 21028 | GTTTATGTAAGCACAG | 67 | 1433 |
| 1245632 | 1301 | 1316 | 21116 | 21131 | TCCCTGTGTAAATAAG | 35 | 1434 |
| 1245658 | 1333 | 1348 | 21148 | 21163 | GATTGGAATGCTACTT | 58 | 1435 |
| 1245684 | 1364 | 1379 | 21179 | 21194 | GTTCTTGTTGATATTC | 84 | 1436 |
| 1245710 | 1414 | 1429 | 21229 | 21244 | GATAAAGCTGCCTGCT | 42 | 1437 |
| 1245736 | 1491 | 1506 | 21306 | 21321 | ACCGTTTTGGGCTAAT | 78 | 1438 |
| 1245762 | 1547 | 1562 | 21362 | 21377 | GACTTCAGAGTTATAC | 16 | 1439 |
| 1245788 | 1589 | 1604 | 21404 | 21419 | GACTATAAAAAGGGAG | 40 | 1440 |
| 1245814 | 1702 | 1717 | 21517 | 21532 | GACCAAGGATATATGA | 48 | 1441 |
| 1245840 | 1752 | 1767 | 21567 | 21582 | TCCTGTGTTAGCTTTA | 56 | 1442 |
| 1245841 | 1765 | 1780 | 21580 | 21595 | GTACAGTTCCTTTTCC | 57 | 38 |
| 1245866 | 1798 | 1813 | 21613 | 21628 | CTCTTGGGTCCATTGT | 40 | 1443 |
| 1245892 | 2195 | 2210 | 22010 | 22025 | ATTAGTCTTGATGTAG | 67 | 1444 |
| 1245918 | 2379 | 2394 | 22194 | 22209 | AGTTTAGAAGTCAAAC | 23 | 1445 |
| 1245944 | N/A | N/A | 3530 | 3545 | TCTTAATTACATTCCC | 64 | 1446 |
| 1245970 | N/A | N/A | 3751 | 3766 | CTAAAGGTTTCTGTTG | 34 | 1447 |
| 1245996 | N/A | N/A | 4406 | 4421 | CATTCGAATTTCTTCA | 77 | 1448 |
| 1246022 | N/A | N/A | 5045 | 5060 | AGTGAATCATTCAGTA | 86 | 1449 |
| 1246048 | N/A | N/A | 5178 | 5193 | ACAGTTTAGATTGCAT | 84 | 1450 |
| 1246065 | N/A | N/A | 5659 | 5674 | ATAAGTTACCAGAGCA | 82 | 48 |
| 1246074 | N/A | N/A | 5741 | 5756 | TGATTTAGTTGGTAGC | 79 | 1451 |
| 1246100 | N/A | N/A | 5923 | 5938 | GGCAAACCTTGAATGA | 61 | 1452 |
| 1246126 | N/A | N/A | 6207 | 6222 | AACCATAGGACATGGA | 71 | 1453 |
| 1246152 | N/A | N/A | 6446 | 6461 | GTAATTCTAAACTAGT | 39 | 1454 |
| 1246178 | N/A | N/A | 6914 | 6929 | CTCGGGAAGTTTAGAC | 47 | 1455 |
| 1246204 | N/A | N/A | 7829 | 7844 | GTGGATTACATACAAG | 57 | 1456 |
| 1246230 | N/A | N/A | 8141 | 8156 | ATGTAAAGTTTGTTAG | 12 | 1457 |
| 1246256 | N/A | N/A | 8610 | 8625 | CAAGGGAACACTGTCA | 58 | 1458 |
| 1246282 | N/A | N/A | 8962 | 8977 | TCCGTTATAAGTTTCA | 65 | 1459 |
| 1246308 | N/A | N/A | 9260 | 9275 | ACAAAATCATGGTGTG | 26 | 1460 |
| 1246334 | N/A | N/A | 9510 | 9525 | ATATTGAGGCACTGGA | 53 | 1461 |
| 1246360 | N/A | N/A | 9653 | 9668 | TAGCTAATGTATGAGG | 48 | 1462 |
| 1246386 | N/A | N/A | 9939 | 9954 | ACTAATGAATCATGAT | 39 | 1463 |
| 1246412 | N/A | N/A | 10181 | 10196 | ACTAATCTCAGTACTC | 45 | 1464 |
| 1246438 | N/A | N/A | 10498 | 10513 | CTTACCAATATGGGAT | 11 | 1465 |
| 1246464 | N/A | N/A | 11155 | 11170 | TGGAAACATGCTTGGC | 62 | 1466 |
| 1246490 | N/A | N/A | 11549 | 11564 | TTCTCTTGACAATGGT | 67 | 1467 |
| | | | 11574 | 11589 | | | |
| 1246516 | N/A | N/A | 11892 | 11907 | GTATAAATGGCAATTC | 56 | 1468 |
| 1246542 | N/A | N/A | 12251 | 12266 | TATTAGTTGGCCTGCC | 14 | 1469 |
| 1246568 | N/A | N/A | 12598 | 12613 | TCTTATCCACACCTTC | 31 | 1470 |
| 1246594 | N/A | N/A | 12704 | 12719 | AAAAAATTGGTTTCGA | 20 | 1471 |
| 1246620 | N/A | N/A | 13574 | 13589 | CTATCAGAACAGTTCA | 48 | 1472 |
| 1246646 | N/A | N/A | 13814 | 13829 | TTTTTATTGGGCCCAA | 51 | 1473 |
| 1246672 | N/A | N/A | 14008 | 14023 | AATCTAGCAACCTCTA | 22 | 1474 |
| 1246698 | N/A | N/A | 14132 | 14147 | TTTCTAAATTACTCCG | 54 | 1475 |
| 1246724 | N/A | N/A | 14382 | 14397 | TAGTGTAGAATTGTCT | 46 | 1476 |
| 1246750 | N/A | N/A | 14600 | 14615 | AGAAATCTAAGAACCC | 25 | 1477 |
| 1246776 | N/A | N/A | 15252 | 15267 | ATTCTATAGCTAAGTA | 23 | 1478 |
| 1246802 | N/A | N/A | 15366 | 15381 | GCATTAGATGGTAAGG | 64 | 1479 |
| 1246828 | N/A | N/A | 15633 | 15648 | CCATAATCTGTGATTA | 9 | 1480 |
| 1246854 | N/A | N/A | 16289 | 16304 | GTTAGAATAGTCTTCA | 46 | 1481 |
| 1246880 | N/A | N/A | 17136 | 17151 | GAATAGCCATGTAGCT | 21 | 1482 |
| 1246906 | N/A | N/A | 17996 | 18011 | ATGAAGTTAGTATAGT | 55 | 1483 |
| 1246932 | N/A | N/A | 18734 | 18749 | GCCTAGTTACAAACCA | 56 | 1484 |
| 1246958 | N/A | N/A | 18968 | 18983 | GACTAATGCAAGATTT | 55 | 1485 |
| 1246984 | N/A | N/A | 19599 | 19614 | ACTCTATAATAAGGTA | 42 | 1486 |
| 1247010 | N/A | N/A | 19785 | 19800 | ACTGATACATACCACT | 52 | 1487 |
| 1247036 | N/A | N/A | 20112 | 20127 | ATCAAGACATTCTAGC | 61 | 1488 |
| 1247062 | N/A | N/A | 20385 | 20400 | TAGTAATCACAAGTAA | 30 | 1489 |
| 1247088 | N/A | N/A | 20601 | 20616 | TAGAATACGCTGAGAG | 47 | 1490 |

TABLE 20
Inhibition of HSD17B13 RNA by 3-10-3 cEt gapmers targeting SEQ ID NO: 1, and 2

| | SEQ | SEQ | SEQ | SEQ | | | |
|---|---|---|---|---|---|---|---|
| | ID NO: | ID NO: | ID NO: | ID NO: | | | |
| | 1 | 1 | 2 | 2 | | HSD17B13 | SEQ |
| Compound | Start | Stop | Start | Stop | | (% | ID |
| Number | Site | Site | Site | Site | Sequence (5′ to 3′) | Inhibition) | NO |
| 1245087 | 23 | 38 | 3117 | 3132 | TTCAGTCCTTGTGTAG | 45 | 1491 |
| 1245113 | 104 | 119 | 3198 | 3213 | GTAGGAGTAGATGATG | 7 | 1492 |
| 1245139 | 167 | 182 | 3261 | 3276 | AACAATCTCCCCAGCC | 59 | 1493 |
| 1245165 | 244 | 259 | 3338 | 3353 | AGAACCAATATGCTCT | 38 | 1494 |
| 1245191 | 292 | 307 | 7581 | 7596 | CGGCACTCAGCTGCAG | 55 | 1495 |
| 1245217 | 329 | 344 | 7618 | 7633 | GTCTACCACATACGCA | 66 | 1496 |
| 1245243 | 394 | 409 | 8788 | 8803 | GTTACATCACCCACTT | 41 | 1497 |
| 1245269 | 425 | 440 | 8819 | 8834 | ATATACTGTCCCAGCA | 43 | 1498 |
| 1245295 | 457 | 472 | 8851 | 8866 | TCTTCATCCTTGGTGC | 48 | 1499 |
| 1245321 | 495 | 510 | 8889 | 8904 | AATGTCCTAGGATGTT | 70 | 1500 |
| 1245347 | 552 | 567 | 10438 | 10453 | CGATGTGGCCATGATT | 44 | 1501 |
| 1245373 | 607 | 622 | 10493 | 10508 | CAATATGGGATGAGGT | 62 | 1502 |
| 1245399 | 657 | 672 | 12075 | 12090 | GTTCTGATGTCAGACC | 55 | 1503 |
| 1245425 | 731 | 746 | 12149 | 12164 | TTTGGTGAACCCAGTA | 34 | 1504 |
| 1245451 | 783 | 798 | 15664 | 15679 | TTCTTACGACTTCATC | 47 | 1505 |
| 1245477 | 835 | 850 | 15716 | 15731 | TACGATGGAACAAAAA | 20 | 1506 |
| 1245503* | 900 | 915 | 20715 | 20730 | TACGATTTAAAATCGC | 0 | 1507 |
| 1245529* | 942 | 957 | 20757 | 20772 | TGATTTTGTGGCCAAC | 72 | 1508 |
| 1245555 | 1007 | 1022 | 20822 | 20837 | TCGAAACTATTCATAT | 64 | 1509 |
| 1245581 | 1081 | 1096 | 20896 | 20911 | CTGCTAGTGCCAAACC | 74 | 1510 |
| 1245607 | 1202 | 1217 | 21017 | 21032 | GTATGTTTATGTAAGC | 80 | 1511 |
| 1245633 | 1305 | 1320 | 21120 | 21135 | ACCTTCCCTGTGTAAA | 60 | 1512 |
| 1245659 | 1334 | 1349 | 21149 | 21164 | AGATTGGAATGCTACT | 63 | 1513 |
| 1245685 | 1366 | 1381 | 21181 | 21196 | GTGTTCTTGTTGATAT | 81 | 1514 |
| 1245711 | 1415 | 1430 | 21230 | 21245 | AGATAAAGCTGCCTGC | 48 | 1515 |
| 1245737 | 1492 | 1507 | 21307 | 21322 | CACCGTTTTGGGCTAA | 85 | 1516 |
| 1245763 | 1548 | 1563 | 21363 | 21378 | GGACTTCAGAGTTATA | 36 | 1517 |
| 1245789 | 1599 | 1614 | 21414 | 21429 | TATCTTATAAGACTAT | 43 | 1518 |
| 1245815 | 1703 | 1718 | 21518 | 21533 | GGACCAAGGATATATG | 56 | 1519 |
| 1245841 | 1765 | 1780 | 21580 | 21595 | GTACAGTTCCTTTTCC | 67 | 38 |
| 1245867 | 1799 | 1814 | 21614 | 21629 | TCTCTTGGGTCCATTG | 63 | 1520 |
| 1245893 | 2196 | 2211 | 22011 | 22026 | GATTAGTCTTGATGTA | 65 | 1521 |
| 1245919 | N/A | N/A | 3356 | 3371 | ACCTTATTAATATCCC | 71 | 1522 |
| 1245945 | N/A | N/A | 3532 | 3547 | GTTCTTAATTACATTC | 64 | 1523 |
| 1245971 | N/A | N/A | 3753 | 3768 | CACTAAAGGTTTCTGT | 56 | 1524 |
| 1245997 | N/A | N/A | 4407 | 4422 | TCATTCGAATTTCTTC | 76 | 1525 |
| 1246023 | N/A | N/A | 5046 | 5061 | GAGTGAATCATTCAGT | 87 | 1526 |
| 1246049 | N/A | N/A | 5179 | 5194 | AACAGTTTAGATTGCA | 71 | 1527 |
| 1246075 | N/A | N/A | 5742 | 5757 | CTGATTTAGTTGGTAG | 78 | 1528 |
| 1246101 | N/A | N/A | 5928 | 5943 | TTTAGGGCAAACCTTG | 67 | 1529 |
| 1246127 | N/A | N/A | 6208 | 6223 | TAACCATAGGACATGG | 70 | 1530 |
| 1246153 | N/A | N/A | 6447 | 6462 | AGTAATTCTAAACTAG | 31 | 1531 |
| 1246179 | N/A | N/A | 7101 | 7116 | AAATTGGCCTCCTGGG | 44 | 1532 |
| 1246205 | N/A | N/A | 7846 | 7861 | ATAATGGGCAGAGCTG | 53 | 1533 |
| 1246231 | N/A | N/A | 8165 | 8180 | TTATTGTAGGGATTGA | 63 | 1534 |
| 1246257 | N/A | N/A | 8612 | 8627 | GCCAAGGGAACACTGT | 61 | 1535 |
| 1246283 | N/A | N/A | 8975 | 8990 | GAAGTATGTGAACTCC | 56 | 1536 |
| 1246309 | N/A | N/A | 9312 | 9327 | ATTACTTCTGATGTCC | 65 | 1537 |
| 1246335 | N/A | N/A | 9511 | 9526 | AATATTGAGGCACTGG | 54 | 1538 |
| 1246361 | N/A | N/A | 9656 | 9671 | AGGTAGCTAATGTATG | 53 | 1539 |
| 1246387 | N/A | N/A | 9940 | 9955 | CACTAATGAATCATGA | 25 | 1540 |
| 1246413 | N/A | N/A | 10182 | 10197 | CACTAATCTCAGTACT | 48 | 1541 |
| 1246439 | N/A | N/A | 10501 | 10516 | ATACTTACCAATATGG | 0 | 1542 |
| 1246465 | N/A | N/A | 11156 | 11171 | ATGGAAACATGCTTGG | 48 | 1543 |
| 1246491 | N/A | N/A | 11565 | 11580 | CAATGGTTGATAGTTT | 47 | 1544 |
| 1246517 | N/A | N/A | 11894 | 11909 | GAGTATAAATGGCAAT | 53 | 1545 |
| 1246543 | N/A | N/A | 12252 | 12267 | CTATTAGTTGGCCTGC | 32 | 1546 |
| 1246569 | N/A | N/A | 12600 | 12615 | GTTCTTATCCACACCT | 57 | 1547 |
| 1246595 | N/A | N/A | 12705 | 12720 | TAAAAAATTGGTTTCG | 22 | 1548 |
| 1246621 | N/A | N/A | 13575 | 13590 | ACTATCAGAACAGTTC | 62 | 1549 |
| 1246647 | N/A | N/A | 13815 | 13830 | GTTTTTATTGGGCCCA | 67 | 1550 |
| 1246673 | N/A | N/A | 14009 | 14024 | CAATCTAGCAACCTCT | 51 | 1551 |
| 1246699 | N/A | N/A | 14166 | 14181 | AGCAAGCCAACAGAGA | 40 | 1552 |
| 1246725 | N/A | N/A | 14384 | 14399 | CTTAGTGTAGAATTGT | 56 | 1553 |
| 1246751 | N/A | N/A | 14614 | 14629 | AATTATTTCTTGCGAG | 16 | 1554 |
| 1246777 | N/A | N/A | 15253 | 15268 | AATTCTATAGCTAAGT | 9 | 1555 |
| 1246803 | N/A | N/A | 15367 | 15382 | GGCATTAGATGGTAAG | 62 | 1556 |
| 1246829 | N/A | N/A | 15634 | 15649 | GCCATAATCTGTGATT | 0 | 1557 |
| 1246855 | N/A | N/A | 16290 | 16305 | AGTTAGAATAGTCTTC | 67 | 1558 |
| 1246881 | N/A | N/A | 17139 | 17154 | ATTGAATAGCCATGTA | 39 | 1559 |
| 1246907 | N/A | N/A | 17997 | 18012 | TATGAAGTTAGTATAG | 30 | 1560 |
| 1246933 | N/A | N/A | 18746 | 18761 | TATATACCTGTTGCCT | 55 | 1561 |
| 1246959 | N/A | N/A | 19388 | 19403 | ATGAGTAGGCAACTGA | 61 | 1562 |
| 1246985 | N/A | N/A | 19608 | 19623 | CTATTATGCACTCTAT | 32 | 1563 |
| 1247011 | N/A | N/A | 19786 | 19801 | CACTGATACATACCAC | 64 | 1564 |
| 1247037 | N/A | N/A | 20114 | 20129 | GCATCAAGACATTCTA | 72 | 1565 |
| 1247063 | N/A | N/A | 20387 | 20402 | TATAGTAATCACAAGT | 53 | 1566 |
| 1247089 | N/A | N/A | 20602 | 20617 | TTAGAATACGCTGAGA | 48 | 1567 |

TABLE 21
Inhibition of HSD17B13 RNA by 3-10-3 cEt gapmers targeting SEQ ID NO: 1, and 2

| | SEQ | SEQ | SEQ | SEQ | | | |
|---|---|---|---|---|---|---|---|
| | ID NO: | ID NO: | ID NO: | ID NO: | | | |
| | 1 | 1 | 2 | 2 | | HSD17B13 | SEQ |
| Compound | Start | Stop | Start | Stop | | (% | ID |
| Number | Site | Site | Site | Site | Sequence (5′ to 3′) | Inhibition) | NO |
| 1245088 | 24 | 39 | 3118 | 3133 | GTTCAGTCCTTGTGTA | 38 | 1568 |
| 1245114 | 105 | 120 | 3199 | 3214 | AGTAGGAGTAGATGAT | 0 | 1569 |
| 1245140 | 168 | 183 | 3262 | 3277 | GAACAATCTCCCCAGC | 63 | 1570 |
| 1245166 | 245 | 260 | 3339 | 3354 | CAGAACCAATATGCTC | 56 | 1571 |
| 1245192 | 293 | 308 | 7582 | 7597 | TCGGCACTCAGCTGCA | 52 | 1572 |
| 1245218 | 330 | 345 | 7619 | 7634 | AGTCTACCACATACGC | 65 | 1573 |
| 1245244 | 395 | 410 | 8789 | 8804 | TGTTACATCACCCACT | 35 | 1574 |
| 1245270 | 426 | 441 | 8820 | 8835 | GATATACTGTCCCAGC | 34 | 1575 |
| 1245296 | 458 | 473 | 8852 | 8867 | CTCTTCATCCTTGGTG | 25 | 1576 |
| 1245322 | 496 | 511 | 8890 | 8905 | AAATGTCCTAGGATGT | 36 | 1577 |
| 1245348 | 553 | 568 | 10439 | 10454 | ACGATGTGGCCATGAT | 52 | 1578 |
| 1245374 | 608 | 623 | N/A | N/A | ACAATATGGGATGAGG | 71 | 1579 |
| 1245400 | 658 | 673 | 12076 | 12091 | AGTTCTGATGTCAGAC | 40 | 1580 |
| 1245426 | 749 | 764 | N/A | N/A | TAATCTTGTGCTTGGA | 54 | 1581 |
| 1245452 | 784 | 799 | 15665 | 15680 | CTTCTTACGACTTCAT | 45 | 1582 |
| 1245478 | 836 | 851 | 15717 | 15732 | ATACGATGGAACAAAA | 27 | 1583 |
| 1245504* | 901 | 916 | 20716 | 20731 | ATACGATTTAAAATCG | 17 | 1584 |
| 1245530* | 966 | 981 | 20781 | 20796 | GGAGCTTATTTATTCA | 38 | 1585 |
| 1245556 | 1008 | 1023 | 20823 | 20838 | TTCGAAACTATTCATA | 44 | 1586 |
| 1245582 | 1082 | 1097 | 20897 | 20912 | GCTGCTAGTGCCAAAC | 67 | 1587 |
| 1245608 | 1250 | 1265 | 21065 | 21080 | GTCCACCTTTAAATGG | 33 | 1588 |
| 1245634 | 1306 | 1321 | 21121 | 21136 | AACCTTCCCTGTGTAA | 38 | 1589 |
| 1245660 | 1335 | 1350 | 21150 | 21165 | CAGATTGGAATGCTAC | 74 | 1590 |
| 1245686 | 1367 | 1382 | 21182 | 21197 | TGTGTTCTTGTTGATA | 69 | 1591 |
| 1245712 | 1416 | 1431 | 21231 | 21246 | GAGATAAAGCTGCCTG | 67 | 1592 |
| 1245738 | 1493 | 1508 | 21308 | 21323 | GCACCGTTTTGGGCTA | 74 | 1593 |
| 1245764 | 1551 | 1566 | 21366 | 21381 | GGTGGACTTCAGAGTT | 26 | 1594 |
| 1245790 | 1600 | 1615 | 21415 | 21430 | GTATCTTATAAGACTA | 81 | 1595 |
| 1245816 | 1704 | 1719 | 21519 | 21534 | GGGACCAAGGATATAT | 17 | 1596 |
| 1245841 | 1765 | 1780 | 21580 | 21595 | GTACAGTTCCTTTTCC | 54 | 38 |
| 1245842 | 1766 | 1781 | 21581 | 21596 | AGTACAGTTCCTTTTC | 69 | 1597 |
| 1245868 | 1800 | 1815 | 21615 | 21630 | TTCTCTTGGGTCCATT | 44 | 1598 |
| 1245894 | 2197 | 2212 | 22012 | 22027 | AGATTAGTCTTGATGT | 63 | 1599 |
| 1245920 | N/A | N/A | N/A | N/A | CACCTTATTAATATCC | 34 | 1600 |
| 1245946 | N/A | N/A | 3537 | 3552 | GCTTAGTTCTTAATTA | 28 | 1601 |
| 1245972 | N/A | N/A | 3754 | 3769 | GCACTAAAGGTTTCTG | 75 | 1602 |
| 1245998 | N/A | N/A | 4408 | 4423 | TTCATTCGAATTTCTT | 71 | 1603 |
| 1246024 | N/A | N/A | 5051 | 5066 | CCTTAGAGTGAATCAT | 65 | 1604 |
| 1246050 | N/A | N/A | 5180 | 5195 | CAACAGTTTAGATTGC | 66 | 1605 |
| 1246065 | N/A | N/A | 5659 | 5674 | ATAAGTTACCAGAGCA | 91 | 48 |
| 1246076 | N/A | N/A | 5743 | 5758 | ACTGATTTAGTTGGTA | 55 | 1606 |
| 1246102 | N/A | N/A | 5929 | 5944 | ATTTAGGGCAAACCTT | 35 | 1607 |
| 1246128 | N/A | N/A | 6209 | 6224 | ATAACCATAGGACATG | 70 | 1608 |
| 1246154 | N/A | N/A | 6453 | 6468 | CTAAGTAGTAATTCTA | 35 | 1609 |
| 1246180 | N/A | N/A | 7103 | 7118 | AAAAATTGGCCTCCTG | 41 | 1610 |
| 1246206 | N/A | N/A | 7847 | 7862 | AATAATGGGCAGAGCT | 43 | 1611 |
| 1246232 | N/A | N/A | 8166 | 8181 | GTTATTGTAGGGATTG | 69 | 1612 |
| 1246258 | N/A | N/A | 8643 | 8658 | CAAGACAGACTGTTGA | 39 | 1613 |
| 1246284 | N/A | N/A | 8976 | 8991 | AGAAGTATGTGAACTC | 41 | 1614 |
| 1246310 | N/A | N/A | 9315 | 9330 | GTAATTACTTCTGATG | 41 | 1615 |
| 1246336 | N/A | N/A | 9512 | 9527 | TAATATTGAGGCACTG | 33 | 1616 |
| 1246362 | N/A | N/A | 9659 | 9674 | TATAGGTAGCTAATGT | 31 | 1617 |
| 1246388 | N/A | N/A | 9941 | 9956 | ACACTAATGAATCATG | 7 | 1618 |
| 1246414 | N/A | N/A | 10183 | 10198 | ACACTAATCTCAGTAC | 6 | 1619 |
| 1246440 | N/A | N/A | 10502 | 10517 | GATACTTACCAATATG | 22 | 1620 |
| 1246466 | N/A | N/A | 11210 | 11225 | CTGTAGGTTTTGCTTC | 27 | 1621 |
| 1246492 | N/A | N/A | 11567 | 11582 | GACAATGGTTGATAGT | 67 | 1622 |
| 1246518 | N/A | N/A | 11925 | 11940 | GCCAAAAATCAGCCAC | 11 | 1623 |
| 1246544 | N/A | N/A | 12253 | 12268 | TCTATTAGTTGGCCTG | 26 | 1624 |
| 1246570 | N/A | N/A | 12609 | 12624 | AATTTTCGGGTTCTTA | 35 | 1625 |
| 1246596 | N/A | N/A | 12710 | 12725 | TCCAGTAAAAAATTGG | 12 | 1626 |
| 1246622 | N/A | N/A | 13577 | 13592 | CCACTATCAGAACAGT | 31 | 1627 |
| 1246648 | N/A | N/A | 13841 | 13856 | ACGAAGCCTGAATGCC | 52 | 1628 |
| 1246674 | N/A | N/A | 14010 | 14025 | ACAATCTAGCAACCTC | 44 | 1629 |
| 1246700 | N/A | N/A | 14167 | 14182 | TAGCAAGCCAACAGAG | 21 | 1630 |
| 1246726 | N/A | N/A | 14390 | 14405 | CATAGGCTTAGTGTAG | 38 | 1631 |
| 1246752 | N/A | N/A | 14615 | 14630 | GAATTATTTCTTGCGA | 61 | 1632 |
| 1246778 | N/A | N/A | 15279 | 15294 | TCAAAGCCTGTTGGAT | 35 | 1633 |
| 1246804 | N/A | N/A | 15368 | 15383 | AGGCATTAGATGGTAA | 51 | 1634 |
| 1246830 | N/A | N/A | 15750 | 15765 | TACTTACTTCTGTAGT | 12 | 1635 |
| 1246856 | N/A | N/A | 16291 | 16306 | TAGTTAGAATAGTCTT | 23 | 1636 |
| 1246882 | N/A | N/A | 17143 | 17158 | GTAAATTGAATAGCCA | 55 | 1637 |
| 1246908 | N/A | N/A | 17999 | 18014 | CTTATGAAGTTAGTAT | 43 | 1638 |
| 1246934 | N/A | N/A | 18747 | 18762 | ATATATACCTGTTGCC | 28 | 1639 |
| 1246960 | N/A | N/A | 19389 | 19404 | GATGAGTAGGCAACTG | 42 | 1640 |
| 1246986 | N/A | N/A | 19609 | 19624 | TCTATTATGCACTCTA | 55 | 1641 |
| 1247012 | N/A | N/A | 19815 | 19830 | GTTCAAATTGGATGCA | 68 | 1642 |
| 1247038 | N/A | N/A | 20124 | 20139 | TCTGATTACAGCATCA | 48 | 1643 |
| 1247064 | N/A | N/A | 20388 | 20403 | CTATAGTAATCACAAG | 35 | 1644 |
| 1247090 | N/A | N/A | 20603 | 20618 | TTTAGAATACGCTGAG | 44 | 1645 |

TABLE 22
Inhibition of HSD17B13 RNA by 3-10-3 cEt gapmers targeting SEQ ID NO: 1, and 2

| | SEQ | SEQ | SEQ | SEQ | | | |
|---|---|---|---|---|---|---|---|
| | ID NO: | ID NO: | ID NO: | ID NO: | | | |
| | 1 | 1 | 2 | 2 | | HSD17B13 | SEQ |
| Compound | Start | Stop | Start | Stop | | (% | ID |
| Number | Site | Site | Site | Site | Sequence (5′ to 3′) | Inhibition) | NO |
| 1245089 | 25 | 40 | 3119 | 3134 | GGTTCAGTCCTTGTGT | 57 | 1646 |
| 1245115 | 106 | 121 | 3200 | 3215 | AAGTAGGAGTAGATGA | 0 | 1647 |
| 1245141 | 171 | 186 | 3265 | 3280 | TGAGAACAATCTCCCC | 69 | 1648 |
| 1245167 | 246 | 261 | 3340 | 3355 | ACAGAACCAATATGCT | 40 | 1649 |
| 1245193 | 294 | 309 | 7583 | 7598 | TTCGGCACTCAGCTGC | 41 | 1650 |
| 1245219 | 354 | 369 | 7643 | 7658 | GATAGATCTCTTCTCT | 0 | 1651 |
| 1245245 | 396 | 411 | 8790 | 8805 | TTGTTACATCACCCAC | 34 | 1652 |
| 1245271 | 427 | 442 | 8821 | 8836 | GGATATACTGTCCCAG | 9 | 1653 |
| 1245297 | 464 | 479 | 8858 | 8873 | GGTAATCTCTTCATCC | 9 | 1654 |
| 1245323 | 497 | 512 | 8891 | 8906 | AAAATGTCCTAGGATG | 0 | 1655 |
| 1245349 | 554 | 569 | 10440 | 10455 | GACGATGTGGCCATGA | 42 | 1656 |
| 1245375 | 609 | 624 | N/A | N/A | AACAATATGGGATGAG | 39 | 1657 |
| 1245401 | 659 | 674 | 12077 | 12092 | AAGTTCTGATGTCAGA | 7 | 1658 |
| 1245427 | 750 | 765 | N/A | N/A | ATAATCTTGTGCTTGG | 36 | 1659 |
| 1245453 | 785 | 800 | 15666 | 15681 | ACTTCTTACGACTTCA | 43 | 1660 |
| 1245479 | 837 | 852 | 15718 | 15733 | TATACGATGGAACAAA | 4 | 1661 |
| 1245505* | 902 | 917 | 20717 | 20732 | CATACGATTTAAAATC | 13 | 1662 |
| 1245531* | 967 | 982 | 20782 | 20797 | TGGAGCTTATTTATTC | 39 | 1663 |
| 1245557 | 1009 | 1024 | 20824 | 20839 | ATTCGAAACTATTCAT | 24 | 1664 |
| 1245583 | 1083 | 1098 | 20898 | 20913 | TGCTGCTAGTGCCAAA | 58 | 1665 |
| 1245609 | 1251 | 1266 | 21066 | 21081 | TGTCCACCTTTAAATG | 29 | 1666 |
| 1245635 | 1307 | 1322 | 21122 | 21137 | AAACCTTCCCTGTGTA | 34 | 1667 |
| 1245661 | 1336 | 1351 | 21151 | 21166 | ACAGATTGGAATGCTA | 50 | 1668 |
| 1245687 | 1379 | 1394 | 21194 | 21209 | GTGCACTCATTCTGTG | 6 | 1669 |
| 1245713 | 1418 | 1433 | 21233 | 21248 | TTGAGATAAAGCTGCC | 49 | 1670 |
| 1245739 | 1494 | 1509 | 21309 | 21324 | TGCACCGTTTTGGGCT | 36 | 1671 |
| 1245765 | 1552 | 1567 | 21367 | 21382 | TGGTGGACTTCAGAGT | 17 | 1672 |
| 1245791 | 1601 | 1616 | 21416 | 21431 | TGTATCTTATAAGACT | 45 | 1673 |
| 1245817 | 1705 | 1720 | 21520 | 21535 | TGGGACCAAGGATATA | 20 | 1674 |
| 1245841 | 1765 | 1780 | 21580 | 21595 | GTACAGTTCCTTTTCC | 48 | 38 |
| 1245843 | 1767 | 1782 | 21582 | 21597 | CAGTACAGTTCCTTTT | 43 | 1675 |
| 1245869 | 1801 | 1816 | 21616 | 21631 | CTTCTCTTGGGTCCAT | 51 | 1676 |
| 1245895 | 2198 | 2213 | 22013 | 22028 | AAGATTAGTCTTGATG | 25 | 1677 |
| 1245921 | N/A | N/A | N/A | N/A | TCACCTTATTAATATC | 0 | 1678 |
| 1245947 | N/A | N/A | 3546 | 3561 | AAAATCGCTGCTTAGT | 35 | 1679 |
| 1245973 | N/A | N/A | 3755 | 3770 | GGCACTAAAGGTTTCT | 62 | 1680 |
| 1245999 | N/A | N/A | 4409 | 4424 | GTTCATTCGAATTTCT | 76 | 1681 |
| 1246025 | N/A | N/A | 5053 | 5068 | AGCCTTAGAGTGAATC | 74 | 1682 |
| 1246051 | N/A | N/A | 5187 | 5202 | CCCAACGCAACAGTTT | 66 | 1683 |
| 1246065 | N/A | N/A | 5659 | 5674 | ATAAGTTACCAGAGCA | 84 | 48 |
| 1246077 | N/A | N/A | 5759 | 5774 | AATAGGAGAGTCTTTC | 47 | 1684 |
| 1246103 | N/A | N/A | 5930 | 5945 | TATTTAGGGCAAACCT | 40 | 1685 |
| 1246129 | N/A | N/A | 6210 | 6225 | CATAACCATAGGACAT | 41 | 1686 |
| 1246155 | N/A | N/A | 6454 | 6469 | GCTAAGTAGTAATTCT | 57 | 1687 |
| 1246181 | N/A | N/A | 7119 | 7134 | GATTAGTTAACCTTTT | 58 | 1688 |
| 1246207 | N/A | N/A | 7848 | 7863 | TAATAATGGGCAGAGC | 30 | 1689 |
| 1246233 | N/A | N/A | 8171 | 8186 | ACAGAGTTATTGTAGG | 58 | 1690 |
| 1246259 | N/A | N/A | 8670 | 8685 | ATTGTATGAGGTCTCT | 49 | 1691 |
| 1246285 | N/A | N/A | 8977 | 8992 | CAGAAGTATGTGAACT | 22 | 1692 |
| 1246311 | N/A | N/A | 9329 | 9344 | CTATATACATCCAAGT | 6 | 1693 |
| 1246337 | N/A | N/A | 9513 | 9528 | CTAATATTGAGGCACT | 51 | 1694 |
| 1246363 | N/A | N/A | 9661 | 9676 | GCTATAGGTAGCTAAT | 20 | 1695 |
| 1246389 | N/A | N/A | 9942 | 9957 | CACACTAATGAATCAT | 30 | 1696 |
| 1246415 | N/A | N/A | 10185 | 10200 | CAACACTAATCTCAGT | 4 | 1697 |
| 1246441 | N/A | N/A | 10520 | 10535 | ATAACATGGCTGGCAT | 14 | 1698 |
| 1246467 | N/A | N/A | 11235 | 11250 | CATAGACATGTGTTCA | 52 | 1699 |
| 1246493 | N/A | N/A | 11568 | 11583 | TGACAATGGTTGATAG | 16 | 1700 |
| 1246519 | N/A | N/A | 11953 | 11968 | GTATCATTTGGCTTAA | 29 | 1701 |
| 1246545 | N/A | N/A | 12254 | 12269 | TTCTATTAGTTGGCCT | 28 | 1702 |
| 1246571 | N/A | N/A | 12610 | 12625 | TAATTTTCGGGTTCTT | 40 | 1703 |
| 1246597 | N/A | N/A | 12723 | 12738 | GGATTAATTCCCTTCC | 10 | 1704 |
| 1246623 | N/A | N/A | 13594 | 13609 | GATAGAGCACATGGCC | 20 | 1705 |
| 1246649 | N/A | N/A | 13842 | 13857 | CACGAAGCCTGAATGC | 24 | 1706 |
| 1246675 | N/A | N/A | 14011 | 14026 | CACAATCTAGCAACCT | 40 | 1707 |
| 1246701 | N/A | N/A | 14170 | 14185 | GAATAGCAAGCCAACA | 64 | 1708 |
| 1246727 | N/A | N/A | 14391 | 14406 | ACATAGGCTTAGTGTA | 0 | 1709 |
| 1246753 | N/A | N/A | 14616 | 14631 | CGAATTATTTCTTGCG | 58 | 1710 |
| 1246779 | N/A | N/A | 15280 | 15295 | CTCAAAGCCTGTTGGA | 10 | 1711 |
| 1246805 | N/A | N/A | 15380 | 15395 | AAAATGGTGGCGAGGC | 0 | 1712 |
| 1246831* | N/A | N/A | 15751 | 15766 | GTACTTACTTCTGTAG | 0 | 1713 |
| 1246857 | N/A | N/A | 16292 | 16307 | TTAGTTAGAATAGTCT | 8 | 1714 |
| 1246883 | N/A | N/A | 17144 | 17159 | AGTAAATTGAATAGCC | 39 | 1715 |
| 1246909 | N/A | N/A | 18000 | 18015 | GCTTATGAAGTTAGTA | 67 | 1716 |
| 1246935 | N/A | N/A | 18798 | 18813 | CGTAAAATTGTGTCTC | 43 | 1717 |
| 1246961 | N/A | N/A | 19397 | 19412 | GCATAAGAGATGAGTA | 33 | 1718 |
| 1246987 | N/A | N/A | 19610 | 19625 | ATCTATTATGCACTCT | 24 | 1719 |
| 1247013 | N/A | N/A | 19819 | 19834 | CATAGTTCAAATTGGA | 39 | 1720 |
| 1247039 | N/A | N/A | 20138 | 20153 | GGGAAAAAGTGTGTTC | 20 | 1721 |
| 1247065 | N/A | N/A | 20395 | 20410 | GTAATTGCTATAGTAA | 33 | 1722 |
| 1247091 | N/A | N/A | 20604 | 20619 | ATTTAGAATACGCTGA | 19 | 1723 |

TABLE 23
Inhibition of HSD17B13 RNA by 3-10-3 cEt gapmers targeting SEQ ID NO: 1, and 2

| | SEQ | SEQ | SEQ | SEQ | | | |
|---|---|---|---|---|---|---|---|
| | ID NO: | ID NO: | ID NO: | ID NO: | | | |
| | 1 | 1 | 2 | 2 | | HSD17B13 | SEQ |
| Compound | Start | Stop | Start | Stop | | (% | ID |
| Number | Site | Site | Site | Site | Sequence (5′ to 3′) | Inhibition) | NO |
| 1245090 | 26 | 41 | 3120 | 3135 | TGGTTCAGTCCTTGTG | 50 | 1724 |
| 1245116 | 107 | 122 | 3201 | 3216 | CAAGTAGGAGTAGATG | 5 | 1725 |
| 1245142 | 172 | 187 | 3266 | 3281 | ATGAGAACAATCTCCC | 65 | 1726 |
| 1245168 | 247 | 262 | 3341 | 3356 | CACAGAACCAATATGC | 54 | 1727 |
| 1245194 | 295 | 310 | 7584 | 7599 | TTTCGGCACTCAGCTG | 29 | 1728 |
| 1245220 | 355 | 370 | 7644 | 7659 | CGATAGATCTCTTCTC | 15 | 1729 |
| 1245246 | 398 | 413 | 8792 | 8807 | GATTGTTACATCACCC | 65 | 1730 |
| 1245272 | 428 | 443 | 8822 | 8837 | TGGATATACTGTCCCA | 24 | 1731 |
| 1245298 | 465 | 480 | 8859 | 8874 | TGGTAATCTCTTCATC | 23 | 1732 |
| 1245324 | 500 | 515 | 8894 | 8909 | CCAAAAATGTCCTAGG | 38 | 1733 |
| 1245350 | 557 | 572 | 10443 | 10458 | TGTGACGATGTGGCCA | 42 | 1734 |
| 1245376 | 610 | 625 | N/A | N/A | GAACAATATGGGATGA | 26 | 1735 |
| 1245402 | 660 | 675 | 12078 | 12093 | GAAGTTCTGATGTCAG | 0 | 1736 |
| 1245428 | 751 | 766 | N/A | N/A | CATAATCTTGTGCTTG | 37 | 1737 |
| 1245454 | 786 | 801 | 15667 | 15682 | GACTTCTTACGACTTC | 38 | 1738 |
| 1245480 | 838 | 853 | 15719 | 15734 | ATATACGATGGAACAA | 0 | 1739 |
| 1245506* | 903 | 918 | 20718 | 20733 | GCATACGATTTAAAAT | 0 | 1740 |
| 1245532* | 969 | 984 | 20784 | 20799 | GCTGGAGCTTATTTAT | 16 | 1741 |
| 1245558 | 1010 | 1025 | 20825 | 20840 | GATTCGAAACTATTCA | 57 | 1742 |
| 1245584 | 1084 | 1099 | 20899 | 20914 | CTGCTGCTAGTGCCAA | 57 | 1743 |
| 1245610 | 1256 | 1271 | 21071 | 21086 | GCTTTTGTCCACCTTT | 68 | 1744 |
| 1245636 | 1308 | 1323 | 21123 | 21138 | TAAACCTTCCCTGTGT | 17 | 1745 |
| 1245662 | 1337 | 1352 | 21152 | 21167 | TACAGATTGGAATGCT | 46 | 1746 |
| 1245688 | 1380 | 1395 | 21195 | 21210 | TGTGCACTCATTCTGT | 18 | 1747 |
| 1245714 | 1419 | 1434 | 21234 | 21249 | GTTGAGATAAAGCTGC | 54 | 1748 |
| 1245740 | 1495 | 1510 | 21310 | 21325 | TTGCACCGTTTTGGGC | 45 | 1749 |
| 1245766 | 1553 | 1568 | 21368 | 21383 | TTGGTGGACTTCAGAG | 8 | 1750 |
| 1245792 | 1602 | 1617 | 21417 | 21432 | ATGTATCTTATAAGAC | 0 | 1751 |
| 1245818 | 1706 | 1721 | 21521 | 21536 | CTGGGACCAAGGATAT | 32 | 1752 |
| 1245841 | 1765 | 1780 | 21580 | 21595 | GTACAGTTCCTTTTCC | 50 | 38 |
| 1245844 | 1768 | 1783 | 21583 | 21598 | CCAGTACAGTTCCTTT | 66 | 1753 |
| 1245870 | 1802 | 1817 | 21617 | 21632 | TCTTCTCTTGGGTCCA | 59 | 1754 |
| 1245896 | 2199 | 2214 | 22014 | 22029 | CAAGATTAGTCTTGAT | 27 | 1755 |
| 1245922 | N/A | N/A | 3357 | 3372 | TACCTTATTAATATCC | 54 | 1756 |
| 1245948 | N/A | N/A | 3547 | 3562 | AAAAATCGCTGCTTAG | 25 | 1757 |
| 1245974 | N/A | N/A | 3834 | 3849 | GACTACGGACTGGCAA | 60 | 1758 |
| 1246000 | N/A | N/A | 4414 | 4429 | AGAAAGTTCATTCGAA | 61 | 1759 |
| 1246026 | N/A | N/A | 5057 | 5072 | TTACAGCCTTAGAGTG | 21 | 1760 |
| 1246052 | N/A | N/A | 5200 | 5215 | TTTGAACCGTATTCCC | 69 | 1761 |
| 1246065 | N/A | N/A | 5659 | 5674 | ATAAGTTACCAGAGCA | 77 | 48 |
| 1246078 | N/A | N/A | 5760 | 5775 | GAATAGGAGAGTCTTT | 58 | 1762 |
| 1246104 | N/A | N/A | 5955 | 5970 | ATTGAGATGACAGTGG | 70 | 1763 |
| 1246130 | N/A | N/A | 6211 | 6226 | CCATAACCATAGGACA | 63 | 1764 |
| 1246156 | N/A | N/A | 6455 | 6470 | TGCTAAGTAGTAATTC | 32 | 1765 |
| 1246182 | N/A | N/A | 7121 | 7136 | AAGATTAGTTAACCTT | 24 | 1766 |
| 1246208 | N/A | N/A | 7851 | 7866 | CAATAATAATGGGCAG | 43 | 1767 |
| 1246234 | N/A | N/A | 8205 | 8220 | GAGTCATAATTTGCTT | 57 | 1768 |
| 1246260 | N/A | N/A | 8672 | 8687 | CTATTGTATGAGGTCT | 42 | 1769 |
| 1246286 | N/A | N/A | 8978 | 8993 | CCAGAAGTATGTGAAC | 8 | 1770 |
| 1246312 | N/A | N/A | 9330 | 9345 | CCTATATACATCCAAG | 53 | 1771 |
| 1246338 | N/A | N/A | 9514 | 9529 | ACTAATATTGAGGCAC | 19 | 1772 |
| 1246364 | N/A | N/A | 9662 | 9677 | AGCTATAGGTAGCTAA | 0 | 1773 |
| 1246390 | N/A | N/A | 9943 | 9958 | CCACACTAATGAATCA | 43 | 1774 |
| 1246416 | N/A | N/A | 10202 | 10217 | TATGGTAAGCCCCATG | 30 | 1775 |
| 1246442 | N/A | N/A | 10522 | 10537 | ATATAACATGGCTGGC | 29 | 1776 |
| 1246468 | N/A | N/A | 11236 | 11251 | ACATAGACATGTGTTC | 35 | 1777 |
| 1246494 | N/A | N/A | 11590 | 11605 | CTCAATAACTGAGTTA | 4 | 1778 |
| 1246520 | N/A | N/A | 11962 | 11977 | GAGAAGGCGGTATCAT | 48 | 1779 |
| 1246546 | N/A | N/A | 12255 | 12270 | CTTCTATTAGTTGGCC | 11 | 1780 |
| 1246572 | N/A | N/A | 12611 | 12626 | TTAATTTTCGGGTTCT | 31 | 1781 |
| 1246598 | N/A | N/A | 12724 | 12739 | AGGATTAATTCCCTTC | 19 | 1782 |
| 1246624 | N/A | N/A | 13595 | 13610 | GGATAGAGCACATGGC | 33 | 1783 |
| 1246650 | N/A | N/A | 13845 | 13860 | GTACACGAAGCCTGAA | 42 | 1784 |
| 1246676 | N/A | N/A | 14012 | 14027 | TCACAATCTAGCAACC | 4 | 1785 |
| 1246702 | N/A | N/A | 14171 | 14186 | TGAATAGCAAGCCAAC | 4 | 1786 |
| 1246728 | N/A | N/A | 14393 | 14408 | AAACATAGGCTTAGTG | 16 | 1787 |
| 1246754 | N/A | N/A | 14724 | 14739 | AATACCCTTGGTGGAG | 16 | 1788 |
| 1246780 | N/A | N/A | 15312 | 15327 | TAATCATGGGACAGGA | 15 | 1789 |
| 1246806 | N/A | N/A | 15381 | 15396 | CAAAATGGTGGCGAGG | 10 | 1790 |
| 1246832 | N/A | N/A | 15771 | 15786 | GTATTTGGGTGTTCTG | 36 | 1791 |
| 1246858 | N/A | N/A | 16293 | 16308 | TTTAGTTAGAATAGTC | 15 | 1792 |
| 1246884 | N/A | N/A | 17227 | 17242 | GTACAAATTTATGCCA | 45 | 1793 |
| 1246910 | N/A | N/A | 18001 | 18016 | GGCTTATGAAGTTAGT | 59 | 1794 |
| 1246936 | N/A | N/A | 18812 | 18827 | TAATTGCATCTGCTCG | 46 | 1795 |
| 1246962 | N/A | N/A | 19398 | 19413 | TGCATAAGAGATGAGT | 19 | 1796 |
| 1246988 | N/A | N/A | 19611 | 19626 | TATCTATTATGCACTC | 48 | 1797 |
| 1247014 | N/A | N/A | 19820 | 19835 | TCATAGTTCAAATTGG | 47 | 1798 |
| 1247040 | N/A | N/A | 20172 | 20187 | CAATTATGAATCTGCA | 25 | 1799 |
| 1247066 | N/A | N/A | 20396 | 20411 | AGTAATTGCTATAGTA | 48 | 1800 |
| 1247092 | N/A | N/A | 20605 | 20620 | CATTTAGAATACGCTG | 25 | 1801 |

TABLE 24
Inhibition of HSD17B13 RNA by 3-10-3 cEt gapmers targeting SEQ ID NO: 1, and 2

| | SEQ | SEQ | SEQ | SEQ | | | |
|---|---|---|---|---|---|---|---|
| | ID NO: | ID NO: | ID NO: | ID NO: | | | |
| | 1 | 1 | 2 | 2 | | HSD17B13 | SEQ |
| Compound | Start | Stop | Start | Stop | | (% | ID |
| Number | Site | Site | Site | Site | Sequence (5′ to 3′) | Inhibition) | NO |
| 1245091 | 27 | 42 | 3121 | 3136 | CTGGTTCAGTCCTTGT | 63 | 1802 |
| 1245117 | 108 | 123 | 3202 | 3217 | CCAAGTAGGAGTAGAT | 19 | 1803 |
| 1245143 | 175 | 190 | 3269 | 3284 | GTAATGAGAACAATCT | 48 | 1804 |
| 1245169 | 248 | 263 | 3342 | 3357 | CCACAGAACCAATATG | 49 | 1805 |
| 1245195 | 296 | 311 | 7585 | 7600 | TTTTCGGCACTCAGCT | 13 | 1806 |
| 1245221 | 356 | 371 | 7645 | 7660 | GCGATAGATCTCTTCT | 24 | 1807 |
| 1245247 | 399 | 414 | 8793 | 8808 | CGATTGTTACATCACC | 47 | 1808 |
| 1245273 | 429 | 444 | 8823 | 8838 | CTGGATATACTGTCCC | 20 | 1809 |
| 1245299 | 469 | 484 | 8863 | 8878 | GTCTTGGTAATCTCTT | 37 | 1810 |
| 1245325 | 511 | 526 | N/A | N/A | GCTTTTGTGATCCAAA | 43 | 1811 |
| 1245351 | 558 | 573 | 10444 | 10459 | CTGTGACGATGTGGCC | 28 | 1812 |
| 1245377 | 611 | 626 | N/A | N/A | GGAACAATATGGGATG | 36 | 1813 |
| 1245403 | 665 | 680 | 12083 | 12098 | GGCCTGAAGTTCTGAT | 0 | 1814 |
| 1245429 | 752 | 767 | N/A | N/A | CCATAATCTTGTGCTT | 32 | 1815 |
| 1245455 | 787 | 802 | 15668 | 15683 | AGACTTCTTACGACTT | 41 | 1816 |
| 1245481 | 839 | 854 | 15720 | 15735 | GATATACGATGGAACA | 46 | 1817 |
| 1245507* | 904 | 919 | 20719 | 20734 | TGCATACGATTTAAAA | 18 | 1818 |
| 1245533* | 970 | 985 | 20785 | 20800 | GGCTGGAGCTTATTTA | 57 | 1819 |
| 1245559 | 1011 | 1026 | 20826 | 20841 | TGATTCGAAACTATTC | 29 | 1820 |
| 1245585 | 1085 | 1100 | 20900 | 20915 | ACTGCTGCTAGTGCCA | 47 | 1821 |
| 1245611 | 1257 | 1272 | 21072 | 21087 | AGCTTTTGTCCACCTT | 57 | 1822 |
| 1245637 | 1310 | 1325 | 21125 | 21140 | CTTAAACCTTCCCTGT | 22 | 1823 |
| 1245663 | 1338 | 1353 | 21153 | 21168 | CTACAGATTGGAATGC | 52 | 1824 |
| 1245689 | 1381 | 1396 | 21196 | 21211 | CTGTGCACTCATTCTG | 51 | 1825 |
| 1245715 | 1420 | 1435 | 21235 | 21250 | GGTTGAGATAAAGCTG | 76 | 1826 |
| 1245741 | 1496 | 1511 | 21311 | 21326 | GTTGCACCGTTTTGGG | 56 | 1827 |
| 1245767 | 1554 | 1569 | 21369 | 21384 | TTTGGTGGACTTCAGA | 16 | 1828 |
| 1245793 | 1613 | 1628 | 21428 | 21443 | CACCTTTCATAATGTA | 59 | 1829 |
| 1245819 | 1707 | 1722 | 21522 | 21537 | TCTGGGACCAAGGATA | 30 | 1830 |
| 1245841 | 1765 | 1780 | 21580 | 21595 | GTACAGTTCCTTTTCC | 50 | 38 |
| 1245845 | 1769 | 1784 | 21584 | 21599 | GCCAGTACAGTTCCTT | 61 | 1831 |
| 1245871 | 2174 | 2189 | 21989 | 22004 | GTCGGATTATTTTTTC | 61 | 1832 |
| 1245897 | 2200 | 2215 | 22015 | 22030 | ACAAGATTAGTCTTGA | 45 | 1833 |
| 1245923 | N/A | N/A | 3368 | 3383 | GATGTATACATTACCT | 67 | 1834 |
| 1245949 | N/A | N/A | 3549 | 3564 | ATAAAAATCGCTGCTT | 11 | 1835 |
| 1245975 | N/A | N/A | 3877 | 3892 | ATCATATGCTAAGTGC | 73 | 1836 |
| 1246001 | N/A | N/A | 4415 | 4430 | CAGAAAGTTCATTCGA | 67 | 1837 |
| 1246027 | N/A | N/A | 5061 | 5076 | TACATTACAGCCTTAG | 75 | 1838 |
| 1246053 | N/A | N/A | 5204 | 5219 | GTTTTTTGAACCGTAT | 71 | 1839 |
| 1246065 | N/A | N/A | 5659 | 5674 | ATAAGTTACCAGAGCA | 74 | 48 |
| 1246079 | N/A | N/A | 5761 | 5776 | AGAATAGGAGAGTCTT | 64 | 1840 |
| 1246105 | N/A | N/A | 5957 | 5972 | GTATTGAGATGACAGT | 68 | 1841 |
| 1246131 | N/A | N/A | 6212 | 6227 | CCCATAACCATAGGAC | 47 | 1842 |
| 1246157 | N/A | N/A | 6464 | 6479 | GCAGTAAAGTGCTAAG | 83 | 1843 |
| 1246183 | N/A | N/A | 7122 | 7137 | GAAGATTAGTTAACCT | 13 | 1844 |
| 1246209 | N/A | N/A | 7938 | 7953 | CATATTCCCTGATGAT | 14 | 1845 |
| 1246235 | N/A | N/A | 8238 | 8253 | AACTACATGACCTGGG | 27 | 1846 |
| 1246261 | N/A | N/A | 8674 | 8689 | TTCTATTGTATGAGGT | 0 | 1847 |
| 1246287 | N/A | N/A | 8980 | 8995 | GTCCAGAAGTATGTGA | 9 | 1848 |
| 1246313 | N/A | N/A | 9331 | 9346 | TCCTATATACATCCAA | 45 | 1849 |
| 1246339 | N/A | N/A | 9515 | 9530 | CACTAATATTGAGGCA | 31 | 1850 |
| 1246365 | N/A | N/A | 9663 | 9678 | CAGCTATAGGTAGCTA | 0 | 1851 |
| 1246391 | N/A | N/A | 9966 | 9981 | TAGTGTAAGCTGAGAG | 75 | 1852 |
| 1246417 | N/A | N/A | 10203 | 10218 | GTATGGTAAGCCCCAT | 36 | 1853 |
| 1246443 | N/A | N/A | 10523 | 10538 | TATATAACATGGCTGG | 8 | 1854 |
| 1246469 | N/A | N/A | 11238 | 11253 | TGACATAGACATGTGT | 42 | 1855 |
| 1246495 | N/A | N/A | 11621 | 11636 | CTGTAGGACTCTGCTC | 48 | 1856 |
| 1246521 | N/A | N/A | 11963 | 11978 | TGAGAAGGCGGTATCA | 20 | 1857 |
| 1246547 | N/A | N/A | 12337 | 12352 | CCCTAATGTGTTTTCC | 25 | 1858 |
| 1246573 | N/A | N/A | 12612 | 12627 | CTTAATTTTCGGGTTC | 37 | 1859 |
| 1246599 | N/A | N/A | 12725 | 12740 | TAGGATTAATTCCCTT | 0 | 1860 |
| 1246625 | N/A | N/A | 13601 | 13616 | AATACAGGATAGAGCA | 0 | 1861 |
| 1246651 | N/A | N/A | 13859 | 13874 | TAGGAAAGCTCATGGT | 27 | 1862 |
| 1246677 | N/A | N/A | 14018 | 14033 | GGAAATTCACAATCTA | 22 | 1863 |
| 1246703 | N/A | N/A | 14172 | 14187 | TTGAATAGCAAGCCAA | 31 | 1864 |
| 1246729 | N/A | N/A | 14394 | 14409 | TAAACATAGGCTTAGT | 34 | 1865 |
| 1246755 | N/A | N/A | 14726 | 14741 | TAAATACCCTTGGTGG | 7 | 1866 |
| 1246781 | N/A | N/A | 15313 | 15328 | TTAATCATGGGACAGG | 27 | 1867 |
| 1246807 | N/A | N/A | 15382 | 15397 | TCAAAATGGTGGCGAG | 31 | 1868 |
| 1246833 | N/A | N/A | 15772 | 15787 | AGTATTTGGGTGTTCT | 17 | 1869 |
| 1246859 | N/A | N/A | 16327 | 16342 | TCACTATATTGCATTC | 35 | 1870 |
| 1246885 | N/A | N/A | 17239 | 17254 | AGGGAATGTTATGTAC | 49 | 1871 |
| 1246911 | N/A | N/A | 18012 | 18027 | AAAAGGCCCAAGGCTT | 30 | 1872 |
| 1246937 | N/A | N/A | 18813 | 18828 | GTAATTGCATCTGCTC | 51 | 1873 |
| 1246963 | N/A | N/A | 19399 | 19414 | ATGCATAAGAGATGAG | 30 | 1874 |
| 1246989 | N/A | N/A | 19649 | 19664 | CTATGCAAGCCTTCAC | 19 | 1875 |
| 1247015 | N/A | N/A | 19827 | 19842 | GTAATATTCATAGTTC | 49 | 1876 |
| 1247041 | N/A | N/A | 20173 | 20188 | CCAATTATGAATCTGC | 61 | 1877 |
| 1247067 | N/A | N/A | 20397 | 20412 | TAGTAATTGCTATAGT | 7 | 1878 |
| 1247093 | N/A | N/A | 20606 | 20621 | TCATTTAGAATACGCT | 20 | 1879 |

TABLE 25
Inhibition of HSD17B13 RNA by 3-10-3 cEt gapmers targeting SEQ ID NO: 1, and 2

| | SEQ | SEQ | SEQ | SEQ | | | |
|---|---|---|---|---|---|---|---|
| | ID NO: | ID NO: | ID NO: | ID NO: | | | |
| | 1 | 1 | 2 | 2 | | HSD17B13 | SEQ |
| Compound | Start | Stop | Start | Stop | | (% | ID |
| Number | Site | Site | Site | Site | Sequence (5′ to 3′) | Inhibition) | NO |
| 1245092 | 31 | 46 | 3125 | 3140 | CCTTCTGGTTCAGTCC | 72 | 1880 |
| 1245118 | 109 | 124 | 3203 | 3218 | TCCAAGTAGGAGTAGA | 24 | 1881 |
| 1245144 | 176 | 191 | 3270 | 3285 | AGTAATGAGAACAATC | 45 | 1882 |
| 1245170 | 249 | 264 | 3343 | 3358 | CCCACAGAACCAATAT | 16 | 1883 |
| 1245196 | 297 | 312 | 7586 | 7601 | GTTTTCGGCACTCAGC | 51 | 1884 |
| 1245222 | 357 | 372 | 7646 | 7661 | AGCGATAGATCTCTTC | 31 | 1885 |
| 1245248 | 400 | 415 | 8794 | 8809 | ACGATTGTTACATCAC | 53 | 1886 |
| 1245274 | 430 | 445 | 8824 | 8839 | GCTGGATATACTGTCC | 36 | 1887 |
| 1245300 | 471 | 486 | 8865 | 8880 | ATGTCTTGGTAATCTC | 23 | 1888 |
| 1245326 | 513 | 528 | N/A | N/A | GTGCTTTTGTGATCCA | 62 | 1889 |
| 1245352 | 559 | 574 | 10445 | 10460 | ACTGTGACGATGTGGC | 40 | 1890 |
| 1245378 | 612 | 627 | N/A | N/A | TGGAACAATATGGGAT | 46 | 1891 |
| 1245404 | 667 | 682 | 12085 | 12100 | AAGGCCTGAAGTTCTG | 5 | 1892 |
| 1245430 | 755 | 770 | N/A | N/A | AGGCCATAATCTTGTG | 33 | 1893 |
| 1245456 | 788 | 803 | 15669 | 15684 | CAGACTTCTTACGACT | 33 | 1894 |
| 1245482 | 840 | 855 | 15721 | 15736 | TGATATACGATGGAAC | 13 | 1895 |
| 1245508* | 905 | 920 | 20720 | 20735 | CTGCATACGATTTAAA | 32 | 1896 |
| 1245534* | 971 | 986 | 20786 | 20801 | TGGCTGGAGCTTATTT | 87 | 1897 |
| 1245560 | 1012 | 1027 | 20827 | 20842 | TTGATTCGAAACTATT | 55 | 1898 |
| 1245586 | 1086 | 1101 | 20901 | 20916 | GACTGCTGCTAGTGCC | 67 | 1899 |
| 1245612 | 1258 | 1273 | 21073 | 21088 | TAGCTTTTGTCCACCT | 60 | 1900 |
| 1245638 | 1312 | 1327 | 21127 | 21142 | GTCTTAAACCTTCCCT | 63 | 1901 |
| 1245664 | 1339 | 1354 | 21154 | 21169 | GCTACAGATTGGAATG | 47 | 1902 |
| 1245690 | 1383 | 1398 | 21198 | 21213 | AGCTGTGCACTCATTC | 57 | 1903 |
| 1245716 | 1421 | 1436 | 21236 | 21251 | AGGTTGAGATAAAGCT | 74 | 1904 |
| 1245742 | 1497 | 1512 | 21312 | 21327 | AGTTGCACCGTTTTGG | 55 | 1905 |
| 1245768 | 1556 | 1571 | 21371 | 21386 | CTTTTGGTGGACTTCA | 10 | 1906 |
| 1245794 | 1615 | 1630 | 21430 | 21445 | GTCACCTTTCATAATG | 45 | 1907 |
| 1245820 | 1708 | 1723 | 21523 | 21538 | CTCTGGGACCAAGGAT | 51 | 1908 |
| 1245841 | 1765 | 1780 | 21580 | 21595 | GTACAGTTCCTTTTCC | 55 | 38 |
| 1245846 | 1770 | 1785 | 21585 | 21600 | AGCCAGTACAGTTCCT | 58 | 1909 |
| 1245872 | 2175 | 2190 | 21990 | 22005 | AGTCGGATTATTTTTT | 42 | 1910 |
| 1245898 | 2201 | 2216 | 22016 | 22031 | AACAAGATTAGTCTTG | 40 | 1911 |
| 1245924 | N/A | N/A | 3401 | 3416 | CATATCTTACTCTGTG | 47 | 1912 |
| 1245950 | N/A | N/A | 3550 | 3565 | CATAAAAATCGCTGCT | 45 | 1913 |
| 1245976 | N/A | N/A | 3882 | 3897 | CGTTTATCATATGCTA | 88 | 1914 |
| 1246002 | N/A | N/A | 4416 | 4431 | CCAGAAAGTTCATTCG | 81 | 1915 |
| 1246028 | N/A | N/A | 5062 | 5077 | TTACATTACAGCCTTA | 67 | 1916 |
| 1246054 | N/A | N/A | 5218 | 5233 | TTAAACTCCAATGTGT | 36 | 1917 |
| 1246065 | N/A | N/A | 5659 | 5674 | ATAAGTTACCAGAGCA | 82 | 48 |
| 1246080 | N/A | N/A | 5800 | 5815 | CTCAAATAGCCTTTTG | 64 | 1918 |
| 1246106 | N/A | N/A | 5979 | 5994 | CCTGAAAAGCCCTATT | 0 | 1919 |
| 1246132 | N/A | N/A | 6222 | 6237 | ACCAAACTTGCCCATA | 46 | 1920 |
| 1246158 | N/A | N/A | 6465 | 6480 | GGCAGTAAAGTGCTAA | 62 | 1921 |
| 1246184 | N/A | N/A | 7123 | 7138 | TGAAGATTAGTTAACC | 21 | 1922 |
| 1246210 | N/A | N/A | 7941 | 7956 | ATCCATATTCCCTGAT | 26 | 1923 |
| 1246236 | N/A | N/A | 8239 | 8254 | TAACTACATGACCTGG | 37 | 1924 |
| 1246262 | N/A | N/A | 8688 | 8703 | GATGAGAGTCTTTCTT | 26 | 1925 |
| 1246288 | N/A | N/A | 9000 | 9015 | AAAGATCTGGCCAGTT | 3 | 1926 |
| 1246314 | N/A | N/A | 9332 | 9347 | ATCCTATATACATCCA | 76 | 1927 |
| 1246340 | N/A | N/A | 9516 | 9531 | ACACTAATATTGAGGC | 68 | 1928 |
| 1246366 | N/A | N/A | 9712 | 9727 | GAACATACATTGTTGC | 58 | 1929 |
| 1246392 | N/A | N/A | 9972 | 9987 | GTTGAGTAGTGTAAGC | 53 | 1930 |
| 1246418 | N/A | N/A | 10209 | 10224 | TTATTGGTATGGTAAG | 14 | 1931 |
| 1246444 | N/A | N/A | 10728 | 10743 | GTAATTGGCTCTTGAG | 44 | 1932 |
| 1246470 | N/A | N/A | 11239 | 11254 | ATGACATAGACATGTG | 23 | 1933 |
| 1246496 | N/A | N/A | 11652 | 11667 | CTACAAAACTGGTATC | 0 | 1934 |
| 1246522 | N/A | N/A | 11982 | 11997 | ACCAATCCTCAGCTTT | 11 | 1935 |
| 1246548 | N/A | N/A | 12353 | 12368 | GATCATTCCTGCTAGT | 35 | 1936 |
| 1246574 | N/A | N/A | 12613 | 12628 | GCTTAATTTTCGGGTT | 36 | 1937 |
| 1246600 | N/A | N/A | 12726 | 12741 | TTAGGATTAATTCCCT | 14 | 1938 |
| 1246626 | N/A | N/A | 13603 | 13618 | ACAATACAGGATAGAG | 23 | 1939 |
| 1246652 | N/A | N/A | 13860 | 13875 | TTAGGAAAGCTCATGG | 26 | 1940 |
| 1246678 | N/A | N/A | 14026 | 14041 | CTTACTAAGGAAATTC | 19 | 1941 |
| 1246704 | N/A | N/A | 14174 | 14189 | CCTTGAATAGCAAGCC | 61 | 1942 |
| 1246730 | N/A | N/A | 14395 | 14410 | ATAAACATAGGCTTAG | 41 | 1943 |
| 1246756 | N/A | N/A | 14728 | 14743 | TCTAAATACCCTTGGT | 26 | 1944 |
| 1246782 | N/A | N/A | 15314 | 15329 | ATTAATCATGGGACAG | 20 | 1945 |
| 1246808 | N/A | N/A | 15383 | 15398 | ATCAAAATGGTGGCGA | 20 | 1946 |
| 1246834 | N/A | N/A | 15773 | 15788 | TAGTATTTGGGTGTTC | 27 | 1947 |
| 1246860 | N/A | N/A | 16377 | 16392 | ACCAAACTTCCAGCAG | 31 | 1948 |
| 1246886 | N/A | N/A | 17675 | 17690 | CAAAACCTTTGTTGCC | 14 | 1949 |
| 1246912 | N/A | N/A | 18015 | 18030 | TCAAAAAGGCCCAAGG | 46 | 1950 |
| 1246938 | N/A | N/A | 18814 | 18829 | AGTAATTGCATCTGCT | 42 | 1951 |
| 1246964 | N/A | N/A | 19404 | 19419 | CAGGAATGCATAAGAG | 33 | 1952 |
| 1246990 | N/A | N/A | 19662 | 19677 | ACCAGAATCCATTCTA | 60 | 1953 |
| 1247016 | N/A | N/A | 19860 | 19875 | AATCAATCTGTCTGAA | 34 | 1954 |
| 1247042 | N/A | N/A | 20174 | 20189 | CCCAATTATGAATCTG | 62 | 1955 |
| 1247068 | N/A | N/A | 20398 | 20413 | ATAGTAATTGCTATAG | 36 | 1956 |
| 1247094 | N/A | N/A | 20607 | 20622 | GTCATTTAGAATACGC | 46 | 1957 |

TABLE 26
Inhibition of HSD17B13 RNA by 3-10-3 cEt gapmers targeting SEQ ID NO: 1, and 2

| | SEQ | SEQ | SEQ | SEQ | | | |
|---|---|---|---|---|---|---|---|
| | ID NO: | ID NO: | ID NO: | ID NO: | | | |
| | 1 | 1 | 2 | 2 | | HSD17B13 | SEQ |
| Compound | Start | Stop | Start | Stop | | (% | ID |
| Number | Site | Site | Site | Site | Sequence (5′ to 3′) | Inhibition) | NO |
| 1245093 | 58 | 73 | 3152 | 3167 | ATGTTCATGGCTTTGC | 73 | 1958 |
| 1245119 | 110 | 125 | 3204 | 3219 | CTCCAAGTAGGAGTAG | 5 | 1959 |
| 1245145 | 180 | 195 | 3274 | 3289 | CTCCAGTAATGAGAAC | 40 | 1960 |
| 1245171 | 250 | 265 | 3344 | 3359 | TCCCACAGAACCAATA | 24 | 1961 |
| 1245197 | 298 | 313 | 7587 | 7602 | AGTTTTCGGCACTCAG | 16 | 1962 |
| 1245223 | 358 | 373 | 7647 | 7662 | GAGCGATAGATCTCTT | 0 | 1963 |
| 1245249 | 401 | 416 | 8795 | 8810 | CACGATTGTTACATCA | 37 | 1964 |
| 1245275 | 431 | 446 | 8825 | 8840 | GGCTGGATATACTGTC | 18 | 1965 |
| 1245301 | 472 | 487 | 8866 | 8881 | AATGTCTTGGTAATCT | 20 | 1966 |
| 1245327 | 514 | 529 | N/A | N/A | AGTGCTTTTGTGATCC | 25 | 1967 |
| 1245353 | 560 | 575 | 10446 | 10461 | CACTGTGACGATGTGG | 10 | 1968 |
| 1245379 | 613 | 628 | N/A | N/A | CTGGAACAATATGGGA | 38 | 1969 |
| 1245405 | 669 | 684 | 12087 | 12102 | CCAAGGCCTGAAGTTC | 20 | 1970 |
| 1245431 | 758 | 773 | N/A | N/A | TACAGGCCATAATCTT | 16 | 1971 |
| 1245457 | 789 | 804 | 15670 | 15685 | TCAGACTTCTTACGAC | 36 | 1972 |
| 1245483 | 841 | 856 | 15722 | 15737 | TTGATATACGATGGAA | 38 | 1973 |
| 1245509* | 906 | 921 | 20721 | 20736 | TCTGCATACGATTTAA | 44 | 1974 |
| 1245535* | 972 | 987 | 20787 | 20802 | CTGGCTGGAGCTTATT | 82 | 1975 |
| 1245561 | 1013 | 1028 | 20828 | 20843 | ATTGATTCGAAACTAT | 22 | 1976 |
| 1245587 | 1087 | 1102 | 20902 | 20917 | TGACTGCTGCTAGTGC | 50 | 1977 |
| 1245613 | 1259 | 1274 | 21074 | 21089 | GTAGCTTTTGTCCACC | 63 | 1978 |
| 1245639 | 1313 | 1328 | 21128 | 21143 | AGTCTTAAACCTTCCC | 77 | 1979 |
| 1245665 | 1340 | 1355 | 21155 | 21170 | GGCTACAGATTGGAAT | 23 | 1980 |
| 1245691 | 1384 | 1399 | 21199 | 21214 | TAGCTGTGCACTCATT | 40 | 1981 |
| 1245717 | 1422 | 1437 | 21237 | 21252 | CAGGTTGAGATAAAGC | 49 | 1982 |
| 1245743 | 1498 | 1513 | 21313 | 21328 | GAGTTGCACCGTTTTG | 48 | 1983 |
| 1245769 | 1557 | 1572 | 21372 | 21387 | ACTTTTGGTGGACTTC | 0 | 1984 |
| 1245795 | 1616 | 1631 | 21431 | 21446 | GGTCACCTTTCATAAT | 57 | 1985 |
| 1245821 | 1709 | 1724 | 21524 | 21539 | TCTCTGGGACCAAGGA | 56 | 1986 |
| 1245841 | 1765 | 1780 | 21580 | 21595 | GTACAGTTCCTTTTCC | 44 | 38 |
| 1245847 | 1771 | 1786 | 21586 | 21601 | TAGCCAGTACAGTTCC | 52 | 1987 |
| 1245873 | 2176 | 2191 | 21991 | 22006 | GAGTCGGATTATTTTT | 44 | 1988 |
| 1245899 | 2204 | 2219 | 22019 | 22034 | CAAAACAAGATTAGTC | 18 | 1989 |
| 1245925 | N/A | N/A | 3403 | 3418 | TACATATCTTACTCTG | 40 | 1990 |
| 1245951 | N/A | N/A | 3551 | 3566 | TCATAAAAATCGCTGC | 26 | 1991 |
| 1245977 | N/A | N/A | 3902 | 3917 | GTTTATCATGTGCCAC | 83 | 1992 |
| 1246003 | N/A | N/A | 4434 | 4449 | GTAAATTCTTGCTATC | 40 | 1993 |
| 1246029 | N/A | N/A | 5063 | 5078 | GTTACATTACAGCCTT | 71 | 1994 |
| 1246055 | N/A | N/A | 5221 | 5236 | AGCTTAAACTCCAATG | 40 | 1995 |
| 1246065 | N/A | N/A | 5659 | 5674 | ATAAGTTACCAGAGCA | 80 | 48 |
| 1246081 | N/A | N/A | 5816 | 5831 | TCAAAGTCAGTATCCC | 79 | 1996 |
| 1246107 | N/A | N/A | 5983 | 5998 | GATACCTGAAAAGCCC | 49 | 1997 |
| 1246133 | N/A | N/A | 6223 | 6238 | TACCAAACTTGCCCAT | 33 | 1998 |
| 1246159 | N/A | N/A | 6473 | 6488 | ATGTAATAGGCAGTAA | 33 | 1999 |
| 1246185 | N/A | N/A | 7481 | 7496 | ACAATTAACATTCGGC | 77 | 2000 |
| 1246211 | N/A | N/A | 7950 | 7965 | TAGGAAGTGATCCATA | 30 | 2001 |
| 1246237 | N/A | N/A | 8240 | 8255 | ATAACTACATGACCTG | 29 | 2002 |
| 1246263 | N/A | N/A | 8693 | 8708 | CCAAAGATGAGAGTCT | 19 | 2003 |
| 1246289 | N/A | N/A | 9001 | 9016 | CAAAGATCTGGCCAGT | 1 | 2004 |
| 1246315 | N/A | N/A | 9346 | 9361 | CAAAAGTGTCCTCGAT | 5 | 2005 |
| 1246341 | N/A | N/A | 9517 | 9532 | TACACTAATATTGAGG | 30 | 2006 |
| 1246367 | N/A | N/A | 9713 | 9728 | TGAACATACATTGTTG | 29 | 2007 |
| 1246393 | N/A | N/A | 9976 | 9991 | GACAGTTGAGTAGTGT | 46 | 2008 |
| 1246419 | N/A | N/A | 10210 | 10225 | TTTATTGGTATGGTAA | 25 | 2009 |
| 1246445 | N/A | N/A | 10729 | 10744 | TGTAATTGGCTCTTGA | 0 | 2010 |
| 1246471 | N/A | N/A | 11248 | 11263 | ACCAAGGCCATGACAT | 17 | 2011 |
| 1246497 | N/A | N/A | 11653 | 11668 | TCTACAAAACTGGTAT | 9 | 2012 |
| 1246523 | N/A | N/A | 11983 | 11998 | AACCAATCCTCAGCTT | 0 | 2013 |
| 1246549 | N/A | N/A | 12411 | 12426 | GATCAAATGTATGTGC | 25 | 2014 |
| 1246575 | N/A | N/A | 12614 | 12629 | GGCTTAATTTTCGGGT | 17 | 2015 |
| 1246601 | N/A | N/A | 12727 | 12742 | TTTAGGATTAATTCCC | 16 | 2016 |
| 1246627 | N/A | N/A | 13604 | 13619 | GACAATACAGGATAGA | 43 | 2017 |
| 1246653 | N/A | N/A | 13861 | 13876 | CTTAGGAAAGCTCATG | 0 | 2018 |
| 1246679 | N/A | N/A | 14027 | 14042 | CCTTACTAAGGAAATT | 28 | 2019 |
| 1246705 | N/A | N/A | 14194 | 14209 | TGTGATTGAGTTCTCC | 62 | 2020 |
| 1246731 | N/A | N/A | 14397 | 14412 | TCATAAACATAGGCTT | 58 | 2021 |
| 1246757 | N/A | N/A | 14729 | 14744 | CTCTAAATACCCTTGG | 7 | 2022 |
| 1246783 | N/A | N/A | 15315 | 15330 | GATTAATCATGGGACA | 9 | 2023 |
| 1246809 | N/A | N/A | 15384 | 15399 | TATCAAAATGGTGGCG | 18 | 2024 |
| 1246835 | N/A | N/A | 15774 | 15789 | TTAGTATTTGGGTGTT | 29 | 2025 |
| 1246861 | N/A | N/A | 16382 | 16397 | TCCCAACCAAACTTCC | 82 | 2026 |
| 1246887 | N/A | N/A | 17766 | 17781 | GCATATTCATTTGGCC | 6 | 2027 |
| 1246913 | N/A | N/A | 18018 | 18033 | GTTTCAAAAAGGCCCA | 39 | 2028 |
| 1246939 | N/A | N/A | 18815 | 18830 | TAGTAATTGCATCTGC | 51 | 2029 |
| 1246965 | N/A | N/A | 19436 | 19451 | TGGAGGAAAGCTTCAA | 10 | 2030 |
| 1246991 | N/A | N/A | 19675 | 19690 | ACCAAGAGACACCACC | 41 | 2031 |
| 1247017 | N/A | N/A | 19889 | 19904 | CTTACGACAGGTCATC | 39 | 2032 |
| 1247043 | N/A | N/A | 20185 | 20200 | TTAGAAGTCAGCCCAA | 37 | 2033 |
| 1247069 | N/A | N/A | 20400 | 20415 | CTATAGTAATTGCTAT | 0 | 2034 |
| 1247095 | N/A | N/A | 20608 | 20623 | GGTCATTTAGAATACG | 39 | 2035 |

### Example 2: Dose-Dependent Inhibition of Human HSD17B13 in HepaRG Cells by cEt Gapmers

[0516] Certain modified oligonucleotides described in the studies above exhibiting significant in vitro inhibition of HSD17B13 RNA were selected and tested at various doses in HepaRG cells.

[0517] The modified oligonucleotides were tested in a series of experiments using the same culture conditions. The results for each experiment are presented in separate tables shown below. Cultured HepaRG cells at a density of 30,000 cells per well were transfected using electroporation with modified oligonucleotides diluted to different concentrations as specified in the Tables below. After a treatment period of approximately 24 hours, HSD17B13 RNA levels were measured as previously described using the Human HSD17B13 primer-probe set RTS43553. HSD17B13 RNA levels were normalized to total RNA, as measured by RIBOGREEN®. Results are presented in the tables below as percent inhibition of HSD17B13, relative to untreated control cells.

[0518] The half maximal inhibitory concentration (IC₅₀) of each modified oligonucleotide was calculated using a linear regression on a log/linear plot of the data in excel and is also presented in the Tables below.

TABLE 27
Multi-dose assay of modified oligonucleotides in HepaRG cells

| ION | % Inhibition | | | | | IC50 |
|---|---|---|---|---|---|---|
| No. | 6 nM | 32 nM | 160 nM | 800 nM | 4000 nM | (μM) |
| 1245651 | 0 | 6 | 24 | 57 | 82 | 0.6 |
| 1245927 | 0 | 19 | 55 | 80 | 90 | 0.2 |
| 1245930 | 0 | 0 | 30 | 77 | 86 | 0.4 |
| 1245957 | 8 | 8 | 49 | 77 | 87 | 0.2 |
| 1245984 | 12 | 14 | 62 | 78 | 90 | 0.1 |
| 1246065 | 0 | 10 | 46 | 65 | 89 | 0.3 |
| 1246066 | 0 | 13 | 35 | 58 | 76 | 0.5 |
| 1246068 | 0 | 5 | 30 | 61 | 83 | 0.5 |
| 1246110 | 3 | 12 | 44 | 82 | 87 | 0.2 |
| 1246115 | 8 | 14 | 45 | 75 | 89 | 0.2 |
| 1246116 | 6 | 17 | 48 | 72 | 83 | 0.2 |
| 1246134 | 3 | 21 | 55 | 79 | 91 | 0.2 |
| 1246163 | 2 | 15 | 43 | 75 | 92 | 0.2 |

TABLE 28
Multi-dose assay of modified oligonucleotides in HepaRG cells

| ION | % Inhibition | | | | | IC50 |
|---|---|---|---|---|---|---|
| No. | 6 nM | 32 nM | 160 nM | 800 nM | 4000 nM | (μM) |
| 1245681 | 0 | 12 | 38 | 72 | 90 | 0.3 |
| 1245790 | 1 | 8 | 37 | 67 | 93 | 0.3 |
| 1245968 | 15 | 23 | 49 | 75 | 93 | 0.2 |
| 1245976 | 0 | 16 | 49 | 73 | 88 | 0.2 |
| 1245977 | 0 | 10 | 41 | 75 | 77 | 0.3 |
| 1245999 | 1 | 14 | 48 | 82 | 90 | 0.2 |
| 1246022 | 13 | 24 | 56 | 83 | 93 | 0.1 |
| 1246023 | 13 | 24 | 66 | 90 | 93 | 0.1 |
| 1246104 | 0 | 0 | 35 | 67 | 87 | 0.4 |
| 1246157 | 0 | 22 | 40 | 75 | 84 | 0.3 |
| 1246226 | 11 | 7 | 40 | 71 | 88 | 0.3 |
| 1246667 | 89 | 95 | 97 | 98 | 100 | <0.006 |
| 1246853 | 0 | 2 | 11 | 57 | 82 | 0.7 |
| 1246861 | 4 | 0 | 12 | 31 | 67 | 2.6 |

### Example 3: Antisense Inhibition of Human HSD17B13 in HepaRG Cells by cEt Gapmers

[0519] Additional modified oligonucleotides complementary to an HSD17B13 nucleic acid were synthesized and tested for their effect on HSD17B13 RNA levels in vitro. The modified oligonucleotides were tested in a series of experiments using the same culture conditions. The results for each experiment are presented in separate tables shown below.

[0520] Cultured HepaRG cells at a density of 30,000 cells per well were transfected using electroporation with 1,000 nM of modified oligonucleotide. After a treatment period of approximately 24 hours, RNA was isolated from the cells and HSD17B13 RNA levels were measured by quantitative real-time RTPCR. Human primer probe set RTS43553 was used to measure RNA levels. HSD17B13 RNA levels were adjusted according to total RNA content, as measured by RIBOGREEN®. Results are presented as percent inhibition of HSD17B13 relative to untreated control cells. As used herein, a value of ‘0’ indicates that treatment with the modified oligonucleotide did not inhibit HSD17B13 mRNA levels. An asterisk (*) indicates that the modified oligonucleotide is complementary to the target transcript within the amplicon region of the primer probe set and so, the associated data is not reliable. In such instances, additional using alternate primer probe sets must be performed to accurately assess the potency and efficacy of such modified oligonucleotides.

[0521] The modified oligonucleotides described in the tables below were 3-10-3 cEt gapmers. The internucleoside linkages throughout each modified oligonucleotide were phosphorothioate (P═S) linkages. All cytosine residues throughout each modified oligonucleotide were 5-methylcytosines.

[0522] “Start site” indicates the 5′-most nucleoside of the target sequence to which the modified oligonucleotide is complementary. “Stop site” indicates the 3′-most nucleoside of the target sequence to which the modified oligonucleotide is complementary. As shown in the Tables below, the modified oligonucleotide are complementary to either the human HSD17B13 mRNA, designated herein as SEQ ID NO: 1 (GENBANK Accession No. NM_178135.4) or to the human HSD17B13 genomic sequence, designated herein as SEQ ID NO: 2 (the complement of GENBANK Accession No. NC_000004.12 truncated from nucleotides 87301001 to 87326000) or to both. ‘N/A’ indicates that the modified oligonucleotide is not complementary to that particular target sequence with 100% complementarity.

TABLE 29
Inhibition of HSD17B13 RNA by 3-10-3 cEt gapmers targeting SEQ ID NO.: 1, and 2

| | SEQ | SEQ | SEQ | SEQ | | | |
|---|---|---|---|---|---|---|---|
| | ID NO: | ID NO: | ID NO: | ID NO: | | | |
| | 1 | 1 | 2 | 2 | | | SEQ |
| Compound | Start | Stop | Start | Stop | | % | ID |
| Number | Site | Site | Site | Site | Sequence (5′ to 3′) | Inhibition | NO |
| 1245927 | N/A | N/A | 3433 | 3448 | AGTAGATGGTAAGTCA | 91 | 121 |
| 1246023 | N/A | N/A | 5046 | 5061 | GAGTGAATCATTCAGT | 89 | 1526 |
| 1340071 | N/A | N/A | 20191 | 20206 | CAGTTATTAGAAGTCA | 85 | 2036 |
| 1340085 | N/A | N/A | 20588 | 20603 | GAGTTATCTGGTTTGC | 84 | 2037 |
| 1340086 | N/A | N/A | 9335 | 9350 | TCGATCCTATATACAT | 40 | 2038 |
| 1340096 | N/A | N/A | 19711 | 19726 | GCTGAAACTGCTGATT | 38 | 2039 |
| 1340099 | 1763 | 1778 | 21578 | 21593 | ACAGTTCCTTTTCCTG | 58 | 2040 |
| 1340104 | N/A | N/A | 10500 | 10515 | TACTTACCAATATGGG | 13 | 2041 |
| 1340120 | N/A | N/A | 11585 | 11600 | TAACTGAGTTATTCTC | 41 | 2042 |
| 1340158 | N/A | N/A | 6440 | 6455 | CTAAACTAGTGGTAAT | 23 | 2043 |
| 1340170 | N/A | N/A | 9657 | 9672 | TAGGTAGCTAATGTAT | 34 | 2044 |
| 1340194 | N/A | N/A | 11077 | 11092 | TAATTACAACCTGGTT | 52 | 2045 |
| 1340201 | N/A | N/A | 14279 | 14294 | GTAAAGGCTGGGTGAG | 41 | 2046 |
| 1340204 | N/A | N/A | 12202 | 12217 | TCATACCACATACCCA | 41 | 2047 |
| 1340209 | N/A | N/A | 18520 | 18535 | CTTAGTACCAAGACAC | 60 | 2048 |
| 1340231 | N/A | N/A | 16134 | 16149 | GATGCTCCATAATAAT | 42 | 2049 |
| 1340239 | N/A | N/A | 19912 | 19927 | TGCATCTTAAGATACC | 81 | 2050 |
| 1340247 | N/A | N/A | 16286 | 16301 | AGAATAGTCTTCAGCA | 80 | 2051 |
| 1340256 | N/A | N/A | 19532 | 19547 | GGCTAAAATGGTCATC | 75 | 2052 |
| 1340276 | N/A | N/A | 19394 | 19409 | TAAGAGATGAGTAGGC | 46 | 2053 |
| 1340278 | N/A | N/A | 15250 | 15265 | TCTATAGCTAAGTATA | 0 | 2054 |
| 1340279 | N/A | N/A | 17802 | 17817 | TATTCTTATGTCATCC | 75 | 2055 |
| 1340290 | 809 | 824 | 15690 | 15705 | ATTGGTAAGTATTCCA | 50 | 2056 |
| 1340305 | 1177 | 1192 | 20992 | 21007 | TTTAAGAGGCATGAAA | 40 | 2057 |
| 1340308 | N/A | N/A | 20111 | 20126 | TCAAGACATTCTAGCC | 79 | 2058 |
| 1340330 | N/A | N/A | 12476 | 12491 | CTAGATACTCAATTTA | 30 | 2059 |
| 1340360 | N/A | N/A | 12800 | 12815 | GGCTGTAAGAGTCAGT | 88 | 2060 |
| 1340368 | N/A | N/A | 13827 | 13842 | CCTACCAAGAGGGTTT | 34 | 2061 |
| 1340380 | N/A | N/A | 12005 | 12020 | ATTGTTAGCTAAGGGA | 22 | 2062 |
| 1340390 | N/A | N/A | 14175 | 14190 | GCCTTGAATAGCAAGC | 32 | 2063 |
| 1340405 | N/A | N/A | 13598 | 13613 | ACAGGATAGAGCACAT | 44 | 2064 |
| 1340412 | N/A | N/A | 14914 | 14929 | ACATTAGCAAGCTAAG | 52 | 2065 |
| 1340423 | N/A | N/A | 9538 | 9553 | ATCCAGATCTGCCCTA | 39 | 2066 |
| 1340427 | N/A | N/A | 8535 | 8550 | TTGCAAGTTTATCAGT | 66 | 2067 |
| 1340432 | N/A | N/A | 4225 | 4240 | GTTTCAACTAAACATG | 65 | 2068 |
| 1340438 | N/A | N/A | 3479 | 3494 | GGACCAGGGAATTTAT | 55 | 2069 |
| 1340439 | 1255 | 1270 | 21070 | 21085 | CTTTTGTCCACCTTTA | 76 | 2070 |
| 1340448 | N/A | N/A | 5672 | 5687 | GTCAGTAGAGAGCATA | 85 | 2071 |
| 1340453 | N/A | N/A | 6084 | 6099 | TTTCACCTCAGGTGAC | 52 | 2072 |
| 1340459 | N/A | N/A | 5083 | 5098 | CTCGCCTAAAGGAGAT | 56 | 2073 |
| 1340465 | N/A | N/A | 5895 | 5910 | TCCTTTGTATTTCGCT | 68 | 2074 |
| 1340479 | N/A | N/A | 6785 | 6800 | CCTCCTTATTTGTTAG | 41 | 2075 |
| 1340491 | N/A | N/A | 3699 | 3714 | TTTCAGATCCCGTTCT | 45 | 2076 |
| 1340525 | N/A | N/A | 9965 | 9980 | AGTGTAAGCTGAGAGT | 71 | 2077 |
| 1340542 | N/A | N/A | 5186 | 5201 | CCAACGCAACAGTTTA | 77 | 2078 |
| 1340546 | N/A | N/A | 5647 | 5662 | AGCATTCATCAGATGT | 83 | 2079 |
| 1340556 | N/A | N/A | 5268 | 5283 | TTGCAAAATGTGATGC | 75 | 2080 |
| 1340563 | N/A | N/A | 3990 | 4005 | GTGTTTACAAGTAAGA | 79 | 2081 |
| 1340567 | N/A | N/A | 6260 | 6275 | AGATGGGCAAGGCCAC | 59 | 2082 |
| 1340576 | N/A | N/A | 11499 | 11514 | CTGGAGAAGAGTTTAC | 38 | 2083 |
| 1340580 | N/A | N/A | 8641 | 8656 | AGACAGACTGTTGAGC | 74 | 2084 |
| 1340597 | N/A | N/A | 18036 | 18051 | CATAGTTTATATGGAT | 56 | 2085 |
| 1340601 | N/A | N/A | 18138 | 18153 | TGTTATCTCAAGTCAG | 81 | 2086 |
| 1340613 | N/A | N/A | 5832 | 5847 | ATGTTAGGACCCAGTC | 60 | 2087 |
| 1340661 | N/A | N/A | 9201 | 9216 | TACACTGACAACCCTT | 56 | 2088 |
| 1340665 | N/A | N/A | 14601 | 14616 | GAGAAATCTAAGAACC | 42 | 2089 |
| 1340667 | N/A | N/A | 9936 | 9951 | AATGAATCATGATTGA | 33 | 2090 |
| 1340669 | N/A | N/A | 10000 | 10015 | TGAAATCTTGTGTAAC | 43 | 2091 |
| 1340684 | N/A | N/A | 8125 | 8140 | AGTGCTTAGTTCATTG | 84 | 2092 |
| 1340685 | N/A | N/A | 16385 | 16400 | CAATCCCAACCAAACT | 49 | 2093 |
| 1340689 | N/A | N/A | 3600 | 3615 | CTTGGAAGGAGACTGG | 60 | 2094 |
| 1340697 | N/A | N/A | 4661 | 4676 | CCGCCCTTAAGTCATT | 53 | 2095 |
| 1340704 | N/A | N/A | 6329 | 6344 | ACTTTCATAGGGAGAC | 80 | 2096 |
| 1340705 | 74 | 89 | 3168 | 3183 | AAGGATTTCTAGGATG | 71 | 2097 |
| 1340722 | N/A | N/A | 5737 | 5752 | TTAGTTGGTAGCTTGC | 72 | 2098 |
| 1340767 | N/A | N/A | 9441 | 9456 | TCCCACAAAACTAACC | 24 | 2099 |
| 1340773 | N/A | N/A | 9773 | 9788 | TAGAACTCCCAACCCA | 44 | 2100 |
| 1340776 | N/A | N/A | 6732 | 6747 | TTACCCCTGGCTTTTC | 26 | 2101 |
| 1340785 | N/A | N/A | 7781 | 7796 | ACTACTTCAGTTAGCA | 79 | 2102 |
| 1340792 | N/A | N/A | 9115 | 9130 | GACAGACCAAGTAGCT | 39 | 2103 |
| 1340812 | N/A | N/A | 10264 | 10279 | CTTCCAAGCATTCCAT | 57 | 2104 |
| 1340813 | N/A | N/A | 7526 | 7541 | CCGAAAAAAGTGGAGG | 31 | 2105 |
| 1340836 | N/A | N/A | 18694 | 18709 | AAGACTTTGAGACTCT | 62 | 2106 |
| 1340850 | N/A | N/A | 8744 | 8759 | CACTTTCACTGGGTGT | 7 | 2107 |
| 1340852 | 1424 | 1439 | 21239 | 21254 | TCCAGGTTGAGATAAA | 70 | 2108 |
| 1340872 | 1614 | 1629 | 21429 | 21444 | TCACCTTTCATAATGT | 63 | 2109 |
| 1340878 | N/A | N/A | 12627 | 12642 | TTGTTAAGCAGATGGC | 84 | 2110 |
| 1340889 | N/A | N/A | 6597 | 6612 | CTACTTTCAAACCTTG | 57 | 2111 |
| 1340903 | N/A | N/A | 20390 | 20405 | TGCTATAGTAATCACA | 65 | 2112 |

TABLE 30
Inhibition of HSD17B13 RNA by 3-10-3 cEt gapmers targeting SEQ ID NO.: 1, and 2

| | SEQ | SEQ | SEQ | SEQ | | | |
|---|---|---|---|---|---|---|---|
| | ID NO: | ID NO: | ID NO: | ID NO: | | | |
| | 1 | 1 | 2 | 2 | | | SEQ |
| Compound | Start | Stop | Start | Stop | | % | ID |
| Number | Site | Site | Site | Site | Sequence (5′ to 3′) | Inhibition | NO |
| 1245927 | N/A | N/A | 3433 | 3448 | AGTAGATGGTAAGTCA | 84 | 121 |
| 1246023 | N/A | N/A | 5046 | 5061 | GAGTGAATCATTCAGT | 89 | 1526 |
| 1340078 | N/A | N/A | 16295 | 16310 | CCTTTAGTTAGAATAG | 37 | 2113 |
| 1340094 | N/A | N/A | 19547 | 19562 | ATTGTTTAGCTGATAG | 61 | 2114 |
| 1340113 | N/A | N/A | 12667 | 12682 | TGTTAACCTGCAGCAG | 39 | 2115 |
| 1340122 | N/A | N/A | 14192 | 14207 | TGATTGAGTTCTCCAC | 48 | 2116 |
| 1340126 | N/A | N/A | 19779 | 19794 | ACATACCACTCTTCTC | 35 | 2117 |
| 1340130 | N/A | N/A | 17954 | 17969 | TTAGAAACTGCTCCTC | 48 | 2118 |
| 1340146 | N/A | N/A | 8132 | 8147 | TTGTTAGAGTGCTTAG | 76 | 2119 |
| 1340149 | N/A | N/A | 11545 | 11560 | CTTGACAATGGTTGCC | 58 | 2120 |
| 1340152 | N/A | N/A | 10138 | 10153 | ATAGATCCTTTTTTGG | 6 | 2121 |
| 1340154 | N/A | N/A | 6284 | 6299 | ACATTCTTCAGGTGTT | 88 | 2122 |
| 1340156 | N/A | N/A | 20194 | 20209 | TTGCAGTTATTAGAAG | 13 | 2123 |
| 1340179 | N/A | N/A | 14315 | 14330 | TAAGATGTCCAGGCAT | 17 | 2124 |
| 1340197 | N/A | N/A | 10554 | 10569 | GAAGTGTAATGCTCCC | 71 | 2125 |
| 1340220 | N/A | N/A | 14611 | 14626 | TATTTCTTGCGAGAAA | 30 | 2126 |
| 1340241 | N/A | N/A | 16220 | 16235 | TTTATAGACTGGGTAG | 59 | 2127 |
| 1340255 | 1783 | 1798 | 21598 | 21613 | TTTCTTATGTAATAGC | 76 | 2128 |
| 1340260 | 1714 | 1729 | 21529 | 21544 | AAACATCTCTGGGACC | 76 | 2129 |
| 1340277 | N/A | N/A | 19914 | 19929 | AGTGCATCTTAAGATA | 57 | 2130 |
| 1340291 | N/A | N/A | 18540 | 18555 | GAAACTCACTTCCTAC | 56 | 2131 |
| 1340297 | N/A | N/A | 14917 | 14932 | AATACATTAGCAAGCT | 45 | 2132 |
| 1340304 | 697 | 712 | 12115 | 12130 | AGACATGAGGTTTTGA | 59 | 2133 |
| 1340310 | N/A | N/A | 13638 | 13653 | GACAATGTGCAGCTCT | 67 | 2134 |
| 1340321 | N/A | N/A | 6606 | 6621 | TAAAGCAGGCTACTTT | 9 | 2135 |
| 1340323 | N/A | N/A | 19396 | 19411 | CATAAGAGATGAGTAG | 44 | 2136 |
| 1340342 | N/A | N/A | 5279 | 5294 | GAGCTAGACAATTGCA | 73 | 2137 |
| 1340350 | N/A | N/A | 9716 | 9731 | TAGTGAACATACATTG | 23 | 2138 |
| 1340361 | N/A | N/A | 5935 | 5950 | GCTGCTATTTAGGGCA | 53 | 2139 |
| 1340364 | N/A | N/A | 5678 | 5693 | TTCTAGGTCAGTAGAG | 58 | 2140 |
| 1340369 | 1433 | 1448 | 21248 | 21263 | TAAAATATGTCCAGGT | 75 | 2141 |
| 1340385 | N/A | N/A | 4389 | 4404 | AGACCAAAAAGATGGC | 80 | 2142 |
| 1340395 | N/A | N/A | 11794 | 11809 | AACTCTATTGATTGGC | 72 | 2143 |
| 1340416 | N/A | N/A | 12496 | 12511 | AATTCACCTTGACTAA | 9 | 2144 |
| 1340419 | N/A | N/A | 12410 | 12425 | ATCAAATGTATGTGCT | 73 | 2145 |
| 1340443 | N/A | N/A | 11117 | 11132 | CTACAGAGGAGTTTGC | 27 | 2146 |
| 1340445 | N/A | N/A | 5847 | 5862 | ACTCCCCAAACATGGA | 48 | 2147 |
| 1340458 | N/A | N/A | 7834 | 7849 | GCTGAGTGGATTACAT | 44 | 2148 |
| 1340469 | N/A | N/A | 6456 | 6471 | GTGCTAAGTAGTAATT | 58 | 2149 |
| 1340476 | 815 | 830 | 15696 | 15711 | TTTCTTATTGGTAAGT | 44 | 2150 |
| 1340512 | N/A | N/A | 6736 | 6751 | GAGATTACCCCTGGCT | 72 | 2151 |
| 1340522 | N/A | N/A | 6915 | 6930 | ACTCGGGAAGTTTAGA | 26 | 2152 |
| 1340533 | N/A | N/A | 9456 | 9471 | GTTGATATTTCCATCT | 55 | 2153 |
| 1340543 | N/A | N/A | 20115 | 20130 | AGCATCAAGACATTCT | 79 | 2154 |
| 1340549 | N/A | N/A | 9968 | 9983 | AGTAGTGTAAGCTGAG | 88 | 2155 |
| 1340552 | N/A | N/A | 12802 | 12817 | CAGGCTGTAAGAGTCA | 56 | 2156 |
| 1340555 | N/A | N/A | 5158 | 5173 | GCCAAACTGCTACTGT | 73 | 2157 |
| 1340558 | N/A | N/A | 15423 | 15438 | ATATCCAGTAGGTGTG | 55 | 2158 |
| 1340606 | N/A | N/A | 18046 | 18061 | CAAGTTTGTTCATAGT | 78 | 2159 |
| 1340614 | 1311 | 1326 | 21126 | 21141 | TCTTAAACCTTCCCTG | 21 | 2160 |
| 1340651 | N/A | N/A | 9344 | 9359 | AAAGTGTCCTCGATCC | 36 | 2161 |
| 1340671 | N/A | N/A | 10293 | 10308 | TGAGAGAACTTATACA | 32 | 2162 |
| 1340673 | N/A | N/A | 5191 | 5206 | TATTCCCAACGCAACA | 62 | 2163 |
| 1340674 | N/A | N/A | 4663 | 4678 | ACCCGCCCTTAAGTCA | 48 | 2164 |
| 1340679 | N/A | N/A | 5758 | 5773 | ATAGGAGAGTCTTTCA | 77 | 2165 |
| 1340681 | N/A | N/A | 8547 | 8562 | GCACATCATGTTTTGC | 44 | 2166 |
| 1340683 | N/A | N/A | 9947 | 9962 | TACACCACACTAATGA | 26 | 2167 |
| 1340696 | N/A | N/A | 8656 | 8671 | CTCAGAGTTCAGGCAA | 67 | 2168 |
| 1340713 | N/A | N/A | 6191 | 6206 | GACAGAGCAATTTACT | 55 | 2169 |
| 1340734 | N/A | N/A | 8964 | 8979 | ACTCCGTTATAAGTTT | 42 | 2170 |
| 1340747 | 218 | 233 | 3312 | 3327 | AAATTCATAAGTAGTC | 39 | 2171 |
| 1340757 | N/A | N/A | 18143 | 18158 | CCTTATGTTATCTCAA | 67 | 2172 |
| 1340761 | N/A | N/A | 4068 | 4083 | CCTTACCAGAATTTAC | 63 | 2173 |
| 1340762 | N/A | N/A | 5651 | 5666 | CCAGAGCATTCATCAG | 83 | 2174 |
| 1340768 | N/A | N/A | 9210 | 9225 | GAAAAGATGTACACTG | 56 | 2175 |
| 1340770 | N/A | N/A | 3505 | 3520 | CTAACCTGACACATAT | 18 | 2176 |
| 1340771 | 1179 | 1194 | 20994 | 21009 | TTTTTAAGAGGCATGA | 60 | 2177 |
| 1340775 | N/A | N/A | 9593 | 9608 | AAGAGCTGGTAAAGGT | 47 | 2178 |
| 1340798 | N/A | N/A | 3619 | 3634 | GACTTGCCTCATTTAG | 69 | 2179 |
| 1340802 | N/A | N/A | 9793 | 9808 | CCTATGCAAATTCATA | 34 | 2180 |
| 1340803 | N/A | N/A | 6333 | 6348 | AAGGACTTTCATAGGG | 71 | 2181 |
| 1340824 | N/A | N/A | 20421 | 20436 | CAGTAAAATTATGCCT | 38 | 2182 |
| 1340831 | N/A | N/A | 3702 | 3717 | AATTTTCAGATCCCGT | 74 | 2183 |
| 1340833 | N/A | N/A | 9117 | 9132 | AAGACAGACCAAGTAG | 16 | 2184 |
| 1340837 | N/A | N/A | 13955 | 13970 | ACCTCTAAGTTAGCCC | 28 | 2185 |
| 1340845 | N/A | N/A | 18697 | 18712 | CAAAAGACTTTGAGAC | 22 | 2186 |
| 1340863 | N/A | N/A | 20598 | 20613 | AATACGCTGAGAGTTA | 48 | 2187 |
| 1340874 | N/A | N/A | 7528 | 7543 | TTCCGAAAAAAGTGGA | 13 | 2188 |
| 1340891 | N/A | N/A | 16895 | 16910 | CGTCAAATAGGGCTGG | 53 | 2189 |

TABLE 31
Inhibition of HSD17B13 RNA by 3-10-3 cEt gapmers targeting SEQ ID NO.: 1, and 2

| | SEQ | SEQ | SEQ | SEQ | | | |
|---|---|---|---|---|---|---|---|
| | ID NO: | ID NO: | ID NO: | ID NO: | | | |
| | 1 | 1 | 2 | 2 | | | SEQ |
| Compound | Start | Stop | Start | Stop | | % | ID |
| Number | Site | Site | Site | Site | Sequence (5′ to 3′) | Inhibition | NO |
| 1245927 | N/A | N/A | 3433 | 3448 | AGTAGATGGTAAGTCA | 91 | 121 |
| 1246023 | N/A | N/A | 5046 | 5061 | GAGTGAATCATTCAGT | 83 | 1526 |
| 1340082 | N/A | N/A | 16329 | 16344 | CTTCACTATATTGCAT | 50 | 2190 |
| 1340083 | N/A | N/A | 20116 | 20131 | CAGCATCAAGACATTC | 72 | 2191 |
| 1340092 | N/A | N/A | 16221 | 16236 | TTTTATAGACTGGGTA | 53 | 2192 |
| 1340098 | N/A | N/A | 19818 | 19833 | ATAGTTCAAATTGGAT | 48 | 2193 |
| 1340125 | N/A | N/A | 15778 | 15793 | TGTTTTAGTATTTGGG | 48 | 2194 |
| 1340131 | N/A | N/A | 18720 | 18735 | CACCATGACAGCTTCA | 65 | 2195 |
| 1340141 | N/A | N/A | 11213 | 11228 | CTTCTGTAGGTTTTGC | 60 | 2196 |
| 1340142 | N/A | N/A | 17984 | 17999 | TAGTTATCTTCTCACT | 52 | 2197 |
| 1340148 | 2240 | 2255 | 22055 | 22070 | ATGCAAAAGCATTCTA | 50 | 2198 |
| 1340164 | N/A | N/A | 11546 | 11561 | TCTTGACAATGGTTGC | 77 | 2199 |
| 1340183 | N/A | N/A | 11795 | 11810 | TAACTCTATTGATTGG | 51 | 2200 |
| 1340187 | N/A | N/A | 20628 | 20643 | GACAACAGAGTTCTGT | 9 | 2201 |
| 1340192 | N/A | N/A | 12498 | 12513 | GAAATTCACCTTGACT | 41 | 2202 |
| 1340206 | 1330 | 1345 | 21145 | 21160 | TGGAATGCTACTTGAA | 85 | 2203 |
| 1340208 | N/A | N/A | 9969 | 9984 | GAGTAGTGTAAGCTGA | 80 | 2204 |
| 1340215 | N/A | N/A | 12416 | 12431 | ACGGTGATCAAATGTA | 53 | 2205 |
| 1340221 | N/A | N/A | 16900 | 16915 | AAAACCGTCAAATAGG | 28 | 2206 |
| 1340230 | N/A | N/A | 18658 | 18673 | TATTCTCCAACTCAGG | 54 | 2207 |
| 1340235 | N/A | N/A | 18145 | 18160 | CTCCTTATGTTATCTC | 57 | 2208 |
| 1340245 | N/A | N/A | 15446 | 15461 | TGTTATCAGAAACTTA | 44 | 2209 |
| 1340270 | N/A | N/A | 7550 | 7565 | GCTGTAATTAGGAAGA | 24 | 2210 |
| 1340274 | N/A | N/A | 10584 | 10599 | AGAACCAGGACTCTCC | 67 | 2211 |
| 1340275 | 219 | 234 | 3313 | 3328 | CAAATTCATAAGTAGT | 76 | 2212 |
| 1340284 | 1467 | 1482 | 21282 | 21297 | AAGAGGCTAGGGAAAT | 66 | 2213 |
| 1340292 | N/A | N/A | 19417 | 19432 | GACAACTGATGTCCAG | 12 | 2214 |
| 1340312 | N/A | N/A | 20423 | 20438 | GACAGTAAAATTATGC | 57 | 2215 |
| 1340314 | N/A | N/A | 18075 | 18090 | TTGTACCCTGTTCTCA | 64 | 2216 |
| 1340320 | N/A | N/A | 14318 | 14333 | AATTAAGATGTCCAGG | 13 | 2217 |
| 1340324 | N/A | N/A | 9950 | 9965 | TTCTACACCACACTAA | 12 | 2218 |
| 1340329 | 1181 | 1196 | 20996 | 21011 | AGTTTTTAAGAGGCAT | 75 | 2219 |
| 1340337 | N/A | N/A | 13659 | 13674 | TCACAAAGTCCCTGAC | 11 | 2220 |
| 1340353 | N/A | N/A | 7125 | 7140 | CATGAAGATTAGTTAA | 11 | 2221 |
| 1340355 | N/A | N/A | 8657 | 8672 | TCTCAGAGTTCAGGCA | 54 | 2222 |
| 1340356 | N/A | N/A | 5680 | 5695 | GTTTCTAGGTCAGTAG | 73 | 2223 |
| 1340366 | N/A | N/A | 6457 | 6472 | AGTGCTAAGTAGTAAT | 71 | 2224 |
| 1340367 | N/A | N/A | 5870 | 5885 | TAAACCCTGGAGCAGC | 66 | 2225 |
| 1340370 | N/A | N/A | 5159 | 5174 | AGCCAAACTGCTACTG | 78 | 2226 |
| 1340426 | N/A | N/A | 9597 | 9612 | TGTGAAGAGCTGGTAA | 41 | 2227 |
| 1340472 | N/A | N/A | 6335 | 6350 | AGAAGGACTTTCATAG | 46 | 2228 |
| 1340475 | N/A | N/A | 8136 | 8151 | AAGTTTGTTAGAGTGC | 74 | 2229 |
| 1340484 | N/A | N/A | 12709 | 12724 | CCAGTAAAAAATTGGT | 23 | 2230 |
| 1340503 | N/A | N/A | 14613 | 14628 | ATTATTTCTTGCGAGA | 60 | 2231 |
| 1340514 | N/A | N/A | 9345 | 9360 | AAAAGTGTCCTCGATC | 17 | 2232 |
| 1340515 | N/A | N/A | 5762 | 5777 | AAGAATAGGAGAGTCT | 70 | 2233 |
| 1340539 | N/A | N/A | 3721 | 3736 | GACTTTTGTTTGTAGC | 74 | 2234 |
| 1340560 | N/A | N/A | 6285 | 6300 | TACATTCTTCAGGTGT | 61 | 2235 |
| 1340577 | N/A | N/A | 5280 | 5295 | TGAGCTAGACAATTGC | 78 | 2236 |
| 1340603 | 699 | 714 | 12117 | 12132 | AGAGACATGAGGTTTT | 77 | 2237 |
| 1340604 | N/A | N/A | 20195 | 20210 | ATTGCAGTTATTAGAA | 42 | 2238 |
| 1340617 | N/A | N/A | 3516 | 3531 | CCTTCATCTAACTAAC | 30 | 2239 |
| 1340636 | N/A | N/A | 12804 | 12819 | CTCAGGCTGTAAGAGT | 21 | 2240 |
| 1340647 | N/A | N/A | 5195 | 5210 | ACCGTATTCCCAACGC | 90 | 2241 |
| 1340659 | N/A | N/A | 8965 | 8980 | AACTCCGTTATAAGTT | 11 | 2242 |
| 1340664 | N/A | N/A | 3676 | 3691 | CCCCTAAGTTATTATC | 33 | 2243 |
| 1340690 | N/A | N/A | 9726 | 9741 | TGTGAGAGGATAGTGA | 50 | 2244 |
| 1340724 | N/A | N/A | 4862 | 4877 | AACTGAAACGATCCTC | 52 | 2245 |
| 1340725 | N/A | N/A | 9466 | 9481 | GGCAGTTGAAGTTGAT | 46 | 2246 |
| 1340727 | N/A | N/A | 8589 | 8604 | GTGGGATAAACTGTTC | 52 | 2247 |
| 1340746 | N/A | N/A | 19564 | 19579 | TAGCTATTGTCTTTGA | 63 | 2248 |
| 1340781 | N/A | N/A | 13956 | 13971 | TACCTCTAAGTTAGCC | 28 | 2249 |
| 1340789 | N/A | N/A | 14193 | 14208 | GTGATTGAGTTCTCCA | 80 | 2250 |
| 1340790 | N/A | N/A | 9118 | 9133 | CAAGACAGACCAAGTA | 27 | 2251 |
| 1340830 | N/A | N/A | 7835 | 7850 | AGCTGAGTGGATTACA | 29 | 2252 |
| 1340834 | N/A | N/A | 6203 | 6218 | ATAGGACATGGAGACA | 82 | 2253 |
| 1340835 | N/A | N/A | 5653 | 5668 | TACCAGAGCATTCATC | 55 | 2254 |
| 1340838 | N/A | N/A | 10294 | 10309 | TTGAGAGAACTTATAC | 21 | 2255 |
| 1340839 | N/A | N/A | 19915 | 19930 | GAGTGCATCTTAAGAT | 43 | 2256 |
| 1340841 | N/A | N/A | 4069 | 4084 | GCCTTACCAGAATTTA | 75 | 2257 |
| 1340864 | N/A | N/A | 9796 | 9811 | AATCCTATGCAAATTC | 42 | 2258 |
| 1340865 | 1716 | 1731 | 21531 | 21546 | CTAAACATCTCTGGGA | 62 | 2259 |
| 1340870 | N/A | N/A | 4402 | 4417 | CGAATTTCTTCAAAGA | 55 | 2260 |
| 1340875 | N/A | N/A | 5974 | 5989 | AAAGCCCTATTCTTCG | 65 | 2261 |
| 1340876 | N/A | N/A | 6626 | 6641 | TGTACAGTAGGCAGTT | 75 | 2262 |
| 1340883 | N/A | N/A | 9224 | 9239 | CAAGTGACAGCATTGA | 48 | 2263 |
| 1340884 | N/A | N/A | 6738 | 6753 | ATGAGATTACCCCTGG | 62 | 2264 |
| 1340885 | N/A | N/A | 10184 | 10199 | AACACTAATCTCAGTA | 15 | 2265 |
| 1340892 | N/A | N/A | 14918 | 14933 | TAATACATTAGCAAGC | 33 | 2266 |

TABLE 32
Inhibition of HSD17B13 RNA by 3-10-3 cEt gapmers targeting SEQ ID NO.: 1, and 2

| | SEQ | SEQ | SEQ | SEQ | | | |
|---|---|---|---|---|---|---|---|
| | ID NO: | ID NO: | ID NO: | ID NO: | | | |
| | 1 | 1 | 2 | 2 | | | SEQ |
| Compound | Start | Stop | Start | Stop | | % | ID |
| Number | Site | Site | Site | Site | Sequence (5′ to 3′) | Inhibition | NO |
| 1245927 | N/A | N/A | 3433 | 3448 | AGTAGATGGTAAGTCA | 59 | 121 |
| 1246023 | N/A | N/A | 5046 | 5061 | GAGTGAATCATTCAGT | 78 | 1526 |
| 1340075 | N/A | N/A | 13957 | 13972 | CTACCTCTAAGTTAGC | 6 | 2267 |
| 1340077 | 1468 | 1483 | 21283 | 21298 | GAAGAGGCTAGGGAAA | 44 | 2268 |
| 1340093 | N/A | N/A | 18744 | 18759 | TATACCTGTTGCCTAG | 11 | 2269 |
| 1340108 | N/A | N/A | 10848 | 10863 | CATATGGTGTACACTG | 15 | 2270 |
| 1340129 | N/A | N/A | 16904 | 16919 | GTCAAAAACCGTCAAA | 39 | 2271 |
| 1340144 | 254 | 269 | 3348 | 3363 | AATATCCCACAGAACC | 60 | 2272 |
| 1340151 | N/A | N/A | 11796 | 11811 | ATAACTCTATTGATTG | 39 | 2273 |
| 1340157 | N/A | N/A | 9147 | 9162 | TGCCAAGCTTTGTGTC | 38 | 2274 |
| 1340163 | N/A | N/A | 14617 | 14632 | CCGAATTATTTCTTGC | 60 | 2275 |
| 1340166 | N/A | N/A | 4412 | 4427 | AAAGTTCATTCGAATT | 63 | 2276 |
| 1340168 | N/A | N/A | 18086 | 18101 | ACCAATGCAGTTTGTA | 75 | 2277 |
| 1340169 | N/A | N/A | 6460 | 6475 | TAAAGTGCTAAGTAGT | 50 | 2278 |
| 1340171 | N/A | N/A | 11553 | 11568 | GTTTTTCTCTTGACAA | 59 | 2279 |
| 1340176 | N/A | N/A | 16117 | 16132 | GCTCTATTGGGCCAGG | 47 | 2280 |
| 1340181 | N/A | N/A | 18176 | 18191 | CGCGAGATGATGTTGC | 53 | 2281 |
| 1340211 | N/A | N/A | 18661 | 18676 | TACTATTCTCCAACTC | 47 | 2282 |
| 1340226 | 1182 | 1197 | 20997 | 21012 | AAGTTTTTAAGAGGCA | 77 | 2283 |
| 1340233 | N/A | N/A | 12499 | 12514 | AGAAATTCACCTTGAC | 39 | 2284 |
| 1340268 | N/A | N/A | 16224 | 16239 | TCTTTTTATAGACTGG | 82 | 2285 |
| 1340273 | N/A | N/A | 11237 | 11252 | GACATAGACATGTGTT | 26 | 2286 |
| 1340283 | 1717 | 1732 | 21532 | 21547 | TCTAAACATCTCTGGG | 40 | 2287 |
| 1340286 | N/A | N/A | 19846 | 19861 | AACCTATGTGTGCACC | 73 | 2288 |
| 1340327 | N/A | N/A | 12418 | 12433 | TAACGGTGATCAAATG | 17 | 2289 |
| 1340332 | N/A | N/A | 10295 | 10310 | TTTGAGAGAACTTATA | 0 | 2290 |
| 1340334 | N/A | N/A | 8973 | 8988 | AGTATGTGAACTCCGT | 81 | 2291 |
| 1340335 | N/A | N/A | 5654 | 5669 | TTACCAGAGCATTCAT | 50 | 2292 |
| 1340352 | N/A | N/A | 9970 | 9985 | TGAGTAGTGTAAGCTG | 62 | 2293 |
| 1340375 | N/A | N/A | 19444 | 19459 | TGGGATAGTGGAGGAA | 13 | 2294 |
| 1340377 | N/A | N/A | 17986 | 18001 | TATAGTTATCTTCTCA | 46 | 2295 |
| 1340386 | N/A | N/A | 14919 | 14934 | ATAATACATTAGCAAG | 7 | 2296 |
| 1340387 | N/A | N/A | 5873 | 5888 | GGCTAAACCCTGGAGC | 36 | 2297 |
| 1340388 | N/A | N/A | 8164 | 8179 | TATTGTAGGGATTGAA | 40 | 2298 |
| 1340397 | N/A | N/A | 3741 | 3756 | CTGTTGCAAGTTCTTC | 85 | 2299 |
| 1340398 | N/A | N/A | 13688 | 13703 | TTTACTCACTTCTGGT | 30 | 2300 |
| 1340415 | N/A | N/A | 12815 | 12830 | CACATAGCTAACTCAG | 42 | 2301 |
| 1340430 | N/A | N/A | 5197 | 5212 | GAACCGTATTCCCAAC | 72 | 2302 |
| 1340433 | N/A | N/A | 9467 | 9482 | AGGCAGTTGAAGTTGA | 47 | 2303 |
| 1340446 | N/A | N/A | 15491 | 15506 | TTAATGCCACCCTACC | 19 | 2304 |
| 1340450 | N/A | N/A | 5712 | 5727 | GATTGCACAAACCACA | 73 | 2305 |
| 1340451 | N/A | N/A | 6301 | 6316 | CTAGGAGATATAACAT | 40 | 2306 |
| 1340452 | N/A | N/A | 5978 | 5993 | CTGAAAAGCCCTATTC | 11 | 2307 |
| 1340454 | N/A | N/A | 7680 | 7695 | AATTTGTGAACCTGCA | 20 | 2308 |
| 1340468 | N/A | N/A | 20197 | 20212 | ACATTGCAGTTATTAG | 42 | 2309 |
| 1340471 | N/A | N/A | 14385 | 14400 | GCTTAGTGTAGAATTG | 16 | 2310 |
| 1340478 | N/A | N/A | 6740 | 6755 | CAATGAGATTACCCCT | 16 | 2311 |
| 1340489 | N/A | N/A | 6388 | 6403 | GATGATTCTGACTCAT | 55 | 2312 |
| 1340498 | N/A | N/A | 20470 | 20485 | TCATTAGGAAAAGTGT | 16 | 2313 |
| 1340521 | N/A | N/A | 8593 | 8608 | AAAGGTGGGATAAACT | 33 | 2314 |
| 1340534 | N/A | N/A | 10187 | 10202 | GCCAACACTAATCTCA | 40 | 2315 |
| 1340545 | N/A | N/A | 20117 | 20132 | ACAGCATCAAGACATT | 53 | 2316 |
| 1340547 | N/A | N/A | 4864 | 4879 | TGAACTGAAACGATCC | 58 | 2317 |
| 1340554 | N/A | N/A | 9225 | 9240 | ACAAGTGACAGCATTG | 44 | 2318 |
| 1340566 | 700 | 715 | 12118 | 12133 | CAGAGACATGAGGTTT | 61 | 2319 |
| 1340574 | N/A | N/A | 9599 | 9614 | TATGTGAAGAGCTGGT | 63 | 2320 |
| 1340578 | N/A | N/A | 3678 | 3693 | ATCCCCTAAGTTATTA | 13 | 2321 |
| 1340585 | N/A | N/A | 5782 | 5797 | GGATTGCAGAAGAGTA | 76 | 2322 |
| 1340610 | N/A | N/A | 20629 | 20644 | TGACAACAGAGTTCTG | 11 | 2323 |
| 1340628 | N/A | N/A | 19585 | 19600 | TAAACTAAAGTACTTG | 1 | 2324 |
| 1340631 | N/A | N/A | 4071 | 4086 | TGGCCTTACCAGAATT | 46 | 2325 |
| 1340634 | N/A | N/A | 7127 | 7142 | GACATGAAGATTAGTT | 3 | 2326 |
| 1340638 | N/A | N/A | 9727 | 9742 | CTGTGAGAGGATAGTG | 33 | 2327 |
| 1340645 | 1352 | 1367 | 21167 | 21182 | ATTCTGTGGCATGGCT | 69 | 2328 |
| 1340668 | 2242 | 2257 | 22057 | 22072 | CCATGCAAAAGCATTC | 72 | 2329 |
| 1340701 | N/A | N/A | 3544 | 3559 | AATCGCTGCTTAGTTC | 41 | 2330 |
| 1340740 | N/A | N/A | 19999 | 20014 | CAGTTTTCCTCATGAT | 65 | 2331 |
| 1340777 | N/A | N/A | 14195 | 14210 | ATGTGATTGAGTTCTC | 36 | 2332 |
| 1340783 | N/A | N/A | 9915 | 9930 | CTATCTCCCTATTTGT | 15 | 2333 |
| 1340821 | N/A | N/A | 7942 | 7957 | GATCCATATTCCCTGA | 74 | 2334 |
| 1340822 | N/A | N/A | 5281 | 5296 | CTGAGCTAGACAATTG | 56 | 2335 |
| 1340832 | N/A | N/A | 8668 | 8683 | TGTATGAGGTCTCTCA | 66 | 2336 |
| 1340873 | N/A | N/A | 6221 | 6236 | CCAAACTTGCCCATAA | 45 | 2337 |
| 1340879 | N/A | N/A | 5161 | 5176 | AGAGCCAAACTGCTAC | 55 | 2338 |
| 1340894 | N/A | N/A | 9372 | 9387 | TAGAACACTTGCCTCA | 31 | 2339 |
| 1340895 | N/A | N/A | 9953 | 9968 | GAGTTCTACACCACAC | 76 | 2340 |
| 1340901 | N/A | N/A | 16332 | 16347 | CTACTTCACTATATTG | 33 | 2341 |
| 1340902 | N/A | N/A | 6628 | 6643 | GCTGTACAGTAGGCAG | 66 | 2342 |
| 1340910 | N/A | N/A | 12722 | 12737 | GATTAATTCCCTTCCA | 30 | 2343 |

TABLE 33
Inhibition of HSD17B13 RNA by 3-10-3 cEt gapmers targeting SEQ ID NO.: 1, and 2

| | SEQ | SEQ | SEQ | SEQ | | | |
|---|---|---|---|---|---|---|---|
| | ID NO: | ID NO: | ID NO: | ID NO: | | | |
| | 1 | 1 | 2 | 2 | | | SEQ |
| Compound | Start | Stop | Start | Stop | | % | ID |
| Number | Site | Site | Site | Site | Sequence (5′ to 3′) | Inhibition | NO |
| 1245927 | N/A | N/A | 3433 | 3448 | AGTAGATGGTAAGTCA | 85 | 121 |
| 1246023 | N/A | N/A | 5046 | 5061 | GAGTGAATCATTCAGT | 79 | 1526 |
| 1340100 | N/A | N/A | 19467 | 19482 | CTGGAAGGAGGATTCA | 39 | 2344 |
| 1340117 | N/A | N/A | 12419 | 12434 | GTAACGGTGATCAAAT | 34 | 2345 |
| 1340119 | N/A | N/A | 9971 | 9986 | TTGAGTAGTGTAAGCT | 52 | 2346 |
| 1340123 | N/A | N/A | 9602 | 9617 | ACATATGTGAAGAGCT | 66 | 2347 |
| 1340127 | 1185 | 1200 | 21000 | 21015 | CAGAAGTTTTTAAGAG | 30 | 2348 |
| 1340135 | N/A | N/A | 19847 | 19862 | GAACCTATGTGTGCAC | 53 | 2349 |
| 1340145 | N/A | N/A | 6391 | 6406 | CTTGATGATTCTGACT | 57 | 2350 |
| 1340189 | N/A | N/A | 20479 | 20494 | TAGTGGACTTCATTAG | 52 | 2351 |
| 1340190 | N/A | N/A | 14921 | 14936 | CTATAATACATTAGCA | 3 | 2352 |
| 1340193 | N/A | N/A | 14618 | 14633 | CCCGAATTATTTCTTG | 34 | 2353 |
| 1340196 | N/A | N/A | 16225 | 16240 | CTCTTTTTATAGACTG | 63 | 2354 |
| 1340205 | N/A | N/A | 19586 | 19601 | GTAAACTAAAGTACTT | 0 | 2355 |
| 1340212 | N/A | N/A | 10930 | 10945 | ATAAGGCCGATTCATG | 38 | 2356 |
| 1340218 | N/A | N/A | 20001 | 20016 | ATCAGTTTTCCTCATG | 48 | 2357 |
| 1340228 | N/A | N/A | 20361 | 20376 | CTAAATTATTGCCTGA | 39 | 2358 |
| 1340229* | N/A | N/A | 20685 | 20700 | GAAGAAACCTGTACAA | 85 | 2359 |
| 1340234 | N/A | N/A | 16337 | 16352 | ATTAACTACTTCACTA | 14 | 2360 |
| 1340238 | N/A | N/A | 11855 | 11870 | TAAGCAGAATTGTGAA | 35 | 2361 |
| 1340244 | N/A | N/A | 16968 | 16983 | CCAATATATACTGACA | 68 | 2362 |
| 1340246 | N/A | N/A | 13959 | 13974 | GTCTACCTCTAAGTTA | 3 | 2363 |
| 1340258 | N/A | N/A | 11570 | 11585 | CTTGACAATGGTTGAT | 54 | 2364 |
| 1340266 | N/A | N/A | 18748 | 18763 | AATATATACCTGTTGC | 38 | 2365 |
| 1340271 | N/A | N/A | 17990 | 18005 | TTAGTATAGTTATCTT | 37 | 2366 |
| 1340309 | N/A | N/A | 14196 | 14211 | TATGTGATTGAGTTCT | 28 | 2367 |
| 1340311 | N/A | N/A | 18178 | 18193 | CTCGCGAGATGATGTT | 40 | 2368 |
| 1340339 | N/A | N/A | 6467 | 6482 | TAGGCAGTAAAGTGCT | 48 | 2369 |
| 1340345 | N/A | N/A | 18092 | 18107 | TGATACACCAATGCAG | 44 | 2370 |
| 1340348 | N/A | N/A | 5283 | 5298 | AACTGAGCTAGACAAT | 44 | 2371 |
| 1340349 | N/A | N/A | 6225 | 6240 | TGTACCAAACTTGCCC | 53 | 2372 |
| 1340354 | N/A | N/A | 9148 | 9163 | ATGCCAAGCTTTGTGT | 50 | 2373 |
| 1340357 | N/A | N/A | 3375 | 3390 | GTTGGAAGATGTATAC | 53 | 2374 |
| 1340402 | N/A | N/A | 9958 | 9973 | GCTGAGAGTTCTACAC | 45 | 2375 |
| 1340406 | N/A | N/A | 8594 | 8609 | TAAAGGTGGGATAAAC | 0 | 2376 |
| 1340428 | N/A | N/A | 9921 | 9936 | AATTCACTATCTCCCT | 10 | 2377 |
| 1340440 | 1360 | 1375 | 21175 | 21190 | TTGTTGATATTCTGTG | 52 | 2378 |
| 1340449 | N/A | N/A | 5198 | 5213 | TGAACCGTATTCCCAA | 76 | 2379 |
| 1340466 | N/A | N/A | 6638 | 6653 | TTGGTTGGAGGCTGTA | 60 | 2380 |
| 1340492 | N/A | N/A | 15497 | 15512 | GCTGCATTAATGCCAC | 46 | 2381 |
| 1340501 | N/A | N/A | 6742 | 6757 | TGCAATGAGATTACCC | 54 | 2382 |
| 1340504 | N/A | N/A | 12500 | 12515 | CAGAAATTCACCTTGA | 28 | 2383 |
| 1340505 | N/A | N/A | 6302 | 6317 | TCTAGGAGATATAACA | 48 | 2384 |
| 1340506 | N/A | N/A | 12758 | 12773 | GAGAATTGTTTAGTTC | 47 | 2385 |
| 1340548 | N/A | N/A | 5715 | 5730 | CCAGATTGCACAAACC | 72 | 2386 |
| 1340553 | N/A | N/A | 10188 | 10203 | TGCCAACACTAATCTC | 30 | 2387 |
| 1340571 | N/A | N/A | 9498 | 9513 | TGGAAGATTAATCATA | 12 | 2388 |
| 1340582 | 2243 | 2258 | 22058 | 22073 | TCCATGCAAAAGCATT | 62 | 2389 |
| 1340626 | N/A | N/A | 5657 | 5672 | AAGTTACCAGAGCATT | 70 | 2390 |
| 1340653 | N/A | N/A | 5984 | 5999 | GGATACCTGAAAAGCC | 68 | 2391 |
| 1340655 | 701 | 716 | 12119 | 12134 | GCAGAGACATGAGGTT | 55 | 2392 |
| 1340657 | N/A | N/A | 4076 | 4091 | TTTCATGGCCTTACCA | 52 | 2393 |
| 1340678 | N/A | N/A | 7130 | 7145 | TTGGACATGAAGATTA | 18 | 2394 |
| 1340692 | N/A | N/A | 3756 | 3771 | AGGCACTAAAGGTTTC | 61 | 2395 |
| 1340693 | N/A | N/A | 4476 | 4491 | GGACAAATGCCTGAGA | 52 | 2396 |
| 1340695 | N/A | N/A | 13689 | 13704 | GTTTACTCACTTCTGG | 29 | 2397 |
| 1340716 | N/A | N/A | 8168 | 8183 | GAGTTATTGTAGGGAT | 69 | 2398 |
| 1340723 | N/A | N/A | 8669 | 8684 | TTGTATGAGGTCTCTC | 50 | 2399 |
| 1340750 | N/A | N/A | 7682 | 7697 | GAAATTTGTGAACCTG | 32 | 2400 |
| 1340759 | N/A | N/A | 9755 | 9770 | CTACCTCCAAATTCCC | 27 | 2401 |
| 1340763 | N/A | N/A | 7947 | 7962 | GAAGTGATCCATATTC | 44 | 2402 |
| 1340786 | N/A | N/A | 12890 | 12905 | TCTTTAGTCAACAGTA | 68 | 2403 |
| 1340788 | N/A | N/A | 18667 | 18682 | CTGGGATACTATTCTC | 57 | 2404 |
| 1340800 | N/A | N/A | 14388 | 14403 | TAGGCTTAGTGTAGAA | 38 | 2405 |
| 1340805 | N/A | N/A | 9319 | 9334 | CCAAGTAATTACTTCT | 68 | 2406 |
| 1340807 | 1471 | 1486 | 21286 | 21301 | AAGGAAGAGGCTAGGG | 57 | 2407 |
| 1340808 | N/A | N/A | 5804 | 5819 | TCCCCTCAAATAGCCT | 60 | 2408 |
| 1340823 | N/A | N/A | 20119 | 20134 | TTACAGCATCAAGACA | 46 | 2409 |
| 1340842 | N/A | N/A | 16124 | 16139 | AATAATAGCTCTATTG | 0 | 2410 |
| 1340846 | N/A | N/A | 8981 | 8996 | TGTCCAGAAGTATGTG | 0 | 2411 |
| 1340857 | N/A | N/A | 5162 | 5177 | AAGAGCCAAACTGCTA | 63 | 2412 |
| 1340859 | N/A | N/A | 3568 | 3583 | TCAACCTGCACACCAT | 72 | 2413 |
| 1340893 | N/A | N/A | 5876 | 5891 | GTAGGCTAAACCCTGG | 62 | 2414 |
| 1340896 | N/A | N/A | 11290 | 11305 | ATGTTTTGATCCAGGG | 46 | 2415 |
| 1340898 | 1720 | 1735 | 21535 | 21550 | TTGTCTAAACATCTCT | 60 | 2416 |
| 1340899 | N/A | N/A | 3679 | 3694 | CATCCCCTAAGTTATT | 24 | 2417 |
| 1340904 | N/A | N/A | 9381 | 9396 | CCATGGATCTAGAACA | 15 | 2418 |
| 1340905 | N/A | N/A | 10345 | 10360 | CGTTAGGTTTCCAAAT | 0 | 2419 |
| 1340908 | N/A | N/A | 5048 | 5063 | TAGAGTGAATCATTCA | 75 | 2420 |

TABLE 34
Inhibition of HSD17B13 RNA by 3-10-3 cEt gapmers targeting SEQ ID NO.: 1, and 2

| | SEQ | SEQ | SEQ | SEQ | | | |
|---|---|---|---|---|---|---|---|
| | ID NO: | ID NO: | ID NO: | ID NO: | | | |
| | 1 | 1 | 2 | 2 | | | SEQ |
| Compound | Start | Stop | Start | Stop | | % | ID |
| Number | Site | Site | Site | Site | Sequence (5′ to 3′) | Inhibition | NO |
| 1245927 | N/A | N/A | 3433 | 3448 | AGTAGATGGTAAGTCA | 88 | 121 |
| 1246023 | N/A | N/A | 5046 | 5061 | GAGTGAATCATTCAGT | 86 | 1526 |
| 1340080 | N/A | N/A | 10970 | 10985 | TAATCTTGAGGCAGGA | 17 | 2421 |
| 1340088 | N/A | N/A | 12420 | 12435 | GGTAACGGTGATCAAA | 51 | 2422 |
| 1340111 | N/A | N/A | 9519 | 9534 | TCTACACTAATATTGA | 21 | 2423 |
| 1340121 | N/A | N/A | 14619 | 14634 | CCCCGAATTATTTCTT | 35 | 2424 |
| 1340132 | N/A | N/A | 16379 | 16394 | CAACCAAACTTCCAGC | 72 | 2425 |
| 1340133 | N/A | N/A | 12502 | 12517 | TGCAGAAATTCACCTT | 54 | 2426 |
| 1340160 | N/A | N/A | 8675 | 8690 | CTTCTATTGTATGAGG | 40 | 2427 |
| 1340175 | N/A | N/A | 11866 | 11881 | TCTTACATGATTAAGC | 35 | 2428 |
| 1340198 | N/A | N/A | 15019 | 15034 | TAAAATAGGGTGCAGT | 58 | 2429 |
| 1340199 | N/A | N/A | 20120 | 20135 | ATTACAGCATCAAGAC | 63 | 2430 |
| 1340200 | N/A | N/A | 14197 | 14212 | TTATGTGATTGAGTTC | 34 | 2431 |
| 1340222 | 734 | 749 | 12152 | 12167 | ATTTTTGGTGAACCCA | 8 | 2432 |
| 1340243 | N/A | N/A | 13690 | 13705 | CGTTTACTCACTTCTG | 21 | 2433 |
| 1340259 | N/A | N/A | 16126 | 16141 | ATAATAATAGCTCTAT | 1 | 2434 |
| 1340261 | 1197 | 1212 | 21012 | 21027 | TTTATGTAAGCACAGA | 70 | 2435 |
| 1340264 | 2247 | 2262 | 22062 | 22077 | ATAGTCCATGCAAAAG | 43 | 2436 |
| 1340269 | 1371 | 1386 | 21186 | 21201 | ATTCTGTGTTCTTGTT | 67 | 2437 |
| 1340280 | N/A | N/A | 17993 | 18008 | AAGTTAGTATAGTTAT | 20 | 2438 |
| 1340303 | N/A | N/A | 17014 | 17029 | TAGCAATTTAGCAAGA | 54 | 2439 |
| 1340307 | N/A | N/A | 11571 | 11586 | TCTTGACAATGGTTGA | 75 | 2440 |
| 1340318 | N/A | N/A | 19607 | 19622 | TATTATGCACTCTATA | 9 | 2441 |
| 1340338 | N/A | N/A | 18672 | 18687 | TTTTACTGGGATACTA | 27 | 2442 |
| 1340347 | N/A | N/A | 9924 | 9939 | TTGAATTCACTATCTC | 45 | 2443 |
| 1340358 | N/A | N/A | 5199 | 5214 | TTGAACCGTATTCCCA | 76 | 2444 |
| 1340363 | N/A | N/A | 9975 | 9990 | ACAGTTGAGTAGTGTA | 72 | 2445 |
| 1340396 | N/A | N/A | 20002 | 20017 | AATCAGTTTTCCTCAT | 53 | 2446 |
| 1340400 | N/A | N/A | 20483 | 20498 | TTCATAGTGGACTTCA | 51 | 2447 |
| 1340418 | N/A | N/A | 20378 | 20393 | CACAAGTAAGGTAAAG | 54 | 2448 |
| 1340425 | N/A | N/A | 6747 | 6762 | CTAGTTGCAATGAGAT | 65 | 2449 |
| 1340431 | N/A | N/A | 10199 | 10214 | GGTAAGCCCCATGCCA | 38 | 2450 |
| 1340437 | N/A | N/A | 11307 | 11322 | CACAAGCACACTGTAA | 2 | 2451 |
| 1340455 | N/A | N/A | 5716 | 5731 | GCCAGATTGCACAAAC | 60 | 2452 |
| 1340462 | N/A | N/A | 16262 | 16277 | GCAGAGACAGTAGATT | 63 | 2453 |
| 1340470 | N/A | N/A | 6228 | 6243 | TTATGTACCAAACTTG | 53 | 2454 |
| 1340493 | N/A | N/A | 5985 | 6000 | AGGATACCTGAAAAGC | 81 | 2455 |
| 1340508 | N/A | N/A | 14392 | 14407 | AACATAGGCTTAGTGT | 18 | 2456 |
| 1340510 | N/A | N/A | 4103 | 4118 | ATCCTGTAAACACTTC | 79 | 2457 |
| 1340513 | N/A | N/A | 7949 | 7964 | AGGAAGTGATCCATAT | 60 | 2458 |
| 1340518 | N/A | N/A | 9004 | 9019 | AGGCAAAGATCTGGCC | 7 | 2459 |
| 1340519 | N/A | N/A | 9386 | 9401 | GCACCCCATGGATCTA | 35 | 2460 |
| 1340524 | 1544 | 1559 | 21359 | 21374 | TTCAGAGTTATACAGA | 66 | 2461 |
| 1340527 | N/A | N/A | 3680 | 3695 | CCATCCCCTAAGTTAT | 14 | 2462 |
| 1340544 | 1022 | 1037 | 20837 | 20852 | CTTTGCAGCATTGATT | 47 | 2463 |
| 1340561 | N/A | N/A | 3782 | 3797 | GAACTGTGTTGCTTGT | 77 | 2464 |
| 1340570 | N/A | N/A | 19887 | 19902 | TACGACAGGTCATCTT | 58 | 2465 |
| 1340572 | N/A | N/A | 6426 | 6441 | ATGGTAAACTGTATGC | 78 | 2466 |
| 1340575 | N/A | N/A | 9606 | 9621 | ATTCACATATGTGAAG | 0 | 2467 |
| 1340588 | N/A | N/A | 4481 | 4496 | TTTTTGGACAAATGCC | 50 | 2468 |
| 1340609 | N/A | N/A | 7683 | 7698 | AGAAATTTGTGAACCT | 39 | 2469 |
| 1340620 | N/A | N/A | 18963 | 18978 | ATGCAAGATTTACTTC | 38 | 2470 |
| 1340640 | N/A | N/A | 5049 | 5064 | TTAGAGTGAATCATTC | 69 | 2471 |
| 1340642 | N/A | N/A | 6308 | 6323 | TGCTACTCTAGGAGAT | 60 | 2472 |
| 1340648 | N/A | N/A | 5809 | 5824 | CAGTATCCCCTCAAAT | 53 | 2473 |
| 1340650 | 1722 | 1737 | 21537 | 21552 | AATTGTCTAAACATCT | 62 | 2474 |
| 1340670 | N/A | N/A | 8170 | 8185 | CAGAGTTATTGTAGGG | 83 | 2475 |
| 1340680 | N/A | N/A | 5169 | 5184 | ATTGCATAAGAGCCAA | 67 | 2476 |
| 1340687 | 519 | 534 | 10405 | 10420 | GAAGAAGTGCTTTTGT | 50 | 2477 |
| 1340691 | N/A | N/A | 9757 | 9772 | AGCTACCTCCAAATTC | 0 | 2478 |
| 1340700 | N/A | N/A | 14077 | 14092 | AACAACCCAGCCTCGG | 20 | 2479 |
| 1340711 | N/A | N/A | 9959 | 9974 | AGCTGAGAGTTCTACA | 67 | 2480 |
| 1340717 | N/A | N/A | 3569 | 3584 | ATCAACCTGCACACCA | 63 | 2481 |
| 1340742 | N/A | N/A | 19472 | 19487 | TATAACTGGAAGGAGG | 44 | 2482 |
| 1340744 | N/A | N/A | 12780 | 12795 | TCAAATGAGGCGGCAC | 46 | 2483 |
| 1340749 | N/A | N/A | 6710 | 6725 | GGAATGCTCATATTAA | 19 | 2484 |
| 1340753 | N/A | N/A | 15498 | 15513 | TGCTGCATTAATGCCA | 15 | 2485 |
| 1340756 | N/A | N/A | 5284 | 5299 | TAACTGAGCTAGACAA | 53 | 2486 |
| 1340765 | N/A | N/A | 9152 | 9167 | GTACATGCCAAGCTTT | 61 | 2487 |
| 1340778 | N/A | N/A | 6468 | 6483 | ATAGGCAGTAAAGTGC | 56 | 2488 |
| 1340828 | N/A | N/A | 8600 | 8615 | CTGTCATAAAGGTGGG | 59 | 2489 |
| 1340840 | N/A | N/A | 9320 | 9335 | TCCAAGTAATTACTTC | 72 | 2490 |
| 1340843 | N/A | N/A | 18505 | 18520 | CTAATTTAGTCAACTT | 40 | 2491 |
| 1340848 | N/A | N/A | 5658 | 5673 | TAAGTTACCAGAGCAT | 77 | 2492 |
| 1340861 | N/A | N/A | 3429 | 3444 | GATGGTAAGTCAAATA | 85 | 2493 |
| 1340871 | N/A | N/A | 7426 | 7441 | TTGGCCGAGGAGGGCG | 3 | 2494 |
| 1340909 | N/A | N/A | 13548 | 13563 | TCTAAAGGGCTGCTCT | 33 | 2495 |
| 1340913 | N/A | N/A | 5883 | 5898 | CGCTACTGTAGGCTAA | 68 | 2496 |
| 1340916 | N/A | N/A | 18094 | 18109 | ATTGATACACCAATGC | 66 | 2497 |

TABLE 35
Inhibition of HSD17B13 RNA by 3-10-3 cEt gapmers targeting SEQ ID NO.: 1, and 2

| | SEQ | SEQ | SEQ | SEQ | | | |
|---|---|---|---|---|---|---|---|
| | ID NO: | ID NO: | ID NO: | ID NO: | | | |
| | 1 | 1 | 2 | 2 | | | SEQ |
| Compound | Start | Stop | Start | Stop | | % | ID |
| Number | Site | Site | Site | Site | Sequence (5′ to 3′) | Inhibition | NO |
| 1245927 | N/A | N/A | 3433 | 3448 | AGTAGATGGTAAGTCA | 84 | 121 |
| 1246023 | N/A | N/A | 5046 | 5061 | GAGTGAATCATTCAGT | 81 | 1526 |
| 1340081 | 1028 | 1043 | 20843 | 20858 | ATAAAGCTTTGCAGCA | 54 | 2498 |
| 1340090 | N/A | N/A | 9961 | 9976 | TAAGCTGAGAGTTCTA | 64 | 2499 |
| 1340106 | N/A | N/A | 19473 | 19488 | CTATAACTGGAAGGAG | 43 | 2500 |
| 1340110 | N/A | N/A | 17228 | 17243 | TGTACAAATTTATGCC | 67 | 2501 |
| 1340114 | 565 | 580 | 10451 | 10466 | GAAGCCACTGTGACGA | 58 | 2502 |
| 1340118 | N/A | N/A | 9608 | 9623 | CAATTCACATATGTGA | 11 | 2503 |
| 1340128 | N/A | N/A | 14461 | 14476 | AGGTATGTCATACTTC | 5 | 2504 |
| 1340143 | N/A | N/A | 15021 | 15036 | GATAAAATAGGGTGCA | 52 | 2505 |
| 1340150 | N/A | N/A | 15501 | 15516 | ATTTGCTGCATTAATG | 20 | 2506 |
| 1340165 | N/A | N/A | 14198 | 14213 | ATTATGTGATTGAGTT | 46 | 2507 |
| 1340177 | N/A | N/A | 3682 | 3697 | GCCCATCCCCTAAGTT | 33 | 2508 |
| 1340185 | N/A | N/A | 14621 | 14636 | TGCCCCGAATTATTTC | 3 | 2509 |
| 1340191 | N/A | N/A | 19890 | 19905 | GCTTACGACAGGTCAT | 73 | 2510 |
| 1340195 | N/A | N/A | 16127 | 16142 | CATAATAATAGCTCTA | 41 | 2511 |
| 1340210 | N/A | N/A | 18969 | 18984 | TGACTAATGCAAGATT | 45 | 2512 |
| 1340223 | N/A | N/A | 13729 | 13744 | TTAAGTACTGTGAGAC | 35 | 2513 |
| 1340254 | N/A | N/A | 13563 | 13578 | GTTCAACTGAACCTCT | 55 | 2514 |
| 1340265 | N/A | N/A | 11897 | 11912 | TGAGAGTATAAATGGC | 67 | 2515 |
| 1340272 | N/A | N/A | 11576 | 11591 | TATTCTCTTGACAATG | 47 | 2516 |
| 1340294 | N/A | N/A | 19651 | 19666 | TTCTATGCAAGCCTTC | 51 | 2517 |
| 1340300 | N/A | N/A | 17998 | 18013 | TTATGAAGTTAGTATA | 31 | 2518 |
| 1340302 | N/A | N/A | 18509 | 18524 | GACACTAATTTAGTCA | 11 | 2519 |
| 1340319 | 2248 | 2263 | 22063 | 22078 | GATAGTCCATGCAAAA | 64 | 2520 |
| 1340322 | 735 | 750 | 12153 | 12168 | GATTTTTGGTGAACCC | 30 | 2521 |
| 1340336 | N/A | N/A | 9925 | 9940 | ATTGAATTCACTATCT | 31 | 2522 |
| 1340372 | N/A | N/A | 5988 | 6003 | GCAAGGATACCTGAAA | 67 | 2523 |
| 1340373 | N/A | N/A | 6309 | 6324 | CTGCTACTCTAGGAGA | 66 | 2524 |
| 1340379 | N/A | N/A | 18095 | 18110 | AATTGATACACCAATG | 55 | 2525 |
| 1340382 | N/A | N/A | 3570 | 3585 | TATCAACCTGCACACC | 62 | 2526 |
| 1340384 | N/A | N/A | 18673 | 18688 | ATTTTACTGGGATACT | 49 | 2527 |
| 1340394 | N/A | N/A | 12503 | 12518 | TTGCAGAAATTCACCT | 36 | 2528 |
| 1340401 | N/A | N/A | 5664 | 5679 | AGAGCATAAGTTACCA | 88 | 2529 |
| 1340404 | N/A | N/A | 9977 | 9992 | AGACAGTTGAGTAGTG | 63 | 2530 |
| 1340414 | N/A | N/A | 7954 | 7969 | AAACTAGGAAGTGATC | 39 | 2531 |
| 1340422 | N/A | N/A | 5202 | 5217 | TTTTTGAACCGTATTC | 56 | 2532 |
| 1340429 | N/A | N/A | 16275 | 16290 | CAGCAAAGTTTGGGCA | 37 | 2533 |
| 1340434 | N/A | N/A | 20121 | 20136 | GATTACAGCATCAAGA | 52 | 2534 |
| 1340435 | N/A | N/A | 3784 | 3799 | TAGAACTGTGTTGCTT | 78 | 2535 |
| 1340482 | 1199 | 1214 | 21014 | 21029 | TGTTTATGTAAGCACA | 74 | 2536 |
| 1340496 | N/A | N/A | 8605 | 8620 | GAACACTGTCATAAAG | 43 | 2537 |
| 1340499 | N/A | N/A | 20380 | 20395 | ATCACAAGTAAGGTAA | 62 | 2538 |
| 1340500 | N/A | N/A | 16380 | 16395 | CCAACCAAACTTCCAG | 70 | 2539 |
| 1340526 | N/A | N/A | 10974 | 10989 | ATTGTAATCTTGAGGC | 39 | 2540 |
| 1340529 | N/A | N/A | 9158 | 9173 | CTCCTGGTACATGCCA | 47 | 2541 |
| 1340538 | N/A | N/A | 6428 | 6443 | TAATGGTAAACTGTAT | 32 | 2542 |
| 1340584 | N/A | N/A | 6748 | 6763 | CCTAGTTGCAATGAGA | 77 | 2543 |
| 1340587 | N/A | N/A | 12422 | 12437 | GTGGTAACGGTGATCA | 49 | 2544 |
| 1340590 | N/A | N/A | 6711 | 6726 | GGGAATGCTCATATTA | 18 | 2545 |
| 1340594 | N/A | N/A | 9057 | 9072 | TGTCAGAGACTCTGTG | 39 | 2546 |
| 1340607 | N/A | N/A | 7708 | 7723 | CGTCCTAGGAAACAAA | 45 | 2547 |
| 1340619 | N/A | N/A | 8236 | 8251 | CTACATGACCTGGGTC | 59 | 2548 |
| 1340630 | N/A | N/A | 4133 | 4148 | GGAGTACTTCACAATT | 79 | 2549 |
| 1340646 | N/A | N/A | 5170 | 5185 | GATTGCATAAGAGCCA | 82 | 2550 |
| 1340654 | N/A | N/A | 5810 | 5825 | TCAGTATCCCCTCAAA | 64 | 2551 |
| 1340677 | N/A | N/A | 8706 | 8721 | GGACCAATATAATCCA | 20 | 2552 |
| 1340706 | N/A | N/A | 9323 | 9338 | ACATCCAAGTAATTAC | 56 | 2553 |
| 1340731 | N/A | N/A | 5717 | 5732 | TGCCAGATTGCACAAA | 54 | 2554 |
| 1340737 | N/A | N/A | 20486 | 20501 | AACTTCATAGTGGACT | 68 | 2555 |
| 1340741 | N/A | N/A | 14165 | 14180 | GCAAGCCAACAGAGAG | 52 | 2556 |
| 1340748 | N/A | N/A | 11384 | 11399 | TTTAGTCAGGTAGAGT | 30 | 2557 |
| 1340751 | N/A | N/A | 9411 | 9426 | TGTATAGCTGCATTTC | 37 | 2558 |
| 1340772 | N/A | N/A | 5886 | 5901 | TTTCGCTACTGTAGGC | 62 | 2559 |
| 1340780 | N/A | N/A | 5054 | 5069 | CAGCCTTAGAGTGAAT | 82 | 2560 |
| 1340782 | N/A | N/A | 4537 | 4552 | GAGATTTGAAGGTTAG | 82 | 2561 |
| 1340804 | N/A | N/A | 20005 | 20020 | AGTAATCAGTTTTCCT | 65 | 2562 |
| 1340811 | 1546 | 1561 | 21361 | 21376 | ACTTCAGAGTTATACA | 35 | 2563 |
| 1340815 | N/A | N/A | 7473 | 7488 | CATTCGGCTAGGCGCG | 46 | 2564 |
| 1340816 | N/A | N/A | 9759 | 9774 | CAAGCTACCTCCAAAT | 25 | 2565 |
| 1340817 | 1372 | 1387 | 21187 | 21202 | CATTCTGTGTTCTTGT | 60 | 2566 |
| 1340820 | N/A | N/A | 3432 | 3447 | GTAGATGGTAAGTCAA | 86 | 2567 |
| 1340826 | 1723 | 1738 | 21538 | 21553 | AAATTGTCTAAACATC | 24 | 2568 |
| 1340847 | N/A | N/A | 6246 | 6261 | ACTGGATGGATTTCTC | 83 | 2569 |
| 1340854 | N/A | N/A | 10201 | 10216 | ATGGTAAGCCCCATGC | 22 | 2570 |
| 1340855 | N/A | N/A | 6471 | 6486 | GTAATAGGCAGTAAAG | 77 | 2571 |
| 1340866 | N/A | N/A | 12794 | 12809 | AAGAGTCAGTATCCTC | 63 | 2572 |
| 1340877 | N/A | N/A | 9521 | 9536 | ATTCTACACTAATATT | 0 | 2573 |
| 1340880 | N/A | N/A | 5285 | 5300 | ATAACTGAGCTAGACA | 71 | 2574 |

TABLE 36
Inhibition of HSD17B13 RNA by 3-10-3 cEt gapmers targeting SEQ ID NO.: 1, and 2

| | SEQ | SEQ | SEQ | SEQ | | | |
|---|---|---|---|---|---|---|---|
| | ID NO: | ID NO: | ID NO: | ID NO: | | | |
| | 1 | 1 | 2 | 2 | | | SEQ |
| Compound | Start | Stop | Start | Stop | | % | ID |
| Number | Site | Site | Site | Site | Sequence (5′ to 3′) | Inhibition | NO |
| 1245927 | N/A | N/A | 3433 | 3448 | AGTAGATGGTAAGTCA | 89 | 121 |
| 1246023 | N/A | N/A | 5046 | 5061 | GAGTGAATCATTCAGT | 91 | 1526 |
| 1340087 | N/A | N/A | 11578 | 11593 | GTTATTCTCTTGACAA | 42 | 2575 |
| 1340089 | N/A | N/A | 11388 | 11403 | AACTTTTAGTCAGGTA | 49 | 2576 |
| 1340116 | N/A | N/A | 16381 | 16396 | CCCAACCAAACTTCCA | 62 | 2577 |
| 1340124 | 603 | 618 | 10489 | 10504 | ATGGGATGAGGTAAGG | 46 | 2578 |
| 1340136 | N/A | N/A | 13782 | 13797 | ACAATCAGGAGTTGCA | 62 | 2579 |
| 1340153 | N/A | N/A | 5223 | 5238 | TTAGCTTAAACTCCAA | 78 | 2580 |
| 1340162 | N/A | N/A | 12504 | 12519 | CTTGCAGAAATTCACC | 40 | 2581 |
| 1340188 | N/A | N/A | 19489 | 19504 | CATCTAGAATTAAGGG | 53 | 2582 |
| 1340203 | N/A | N/A | 18690 | 18705 | CTTTGAGACTCTTGTT | 61 | 2583 |
| 1340207 | N/A | N/A | 18002 | 18017 | AGGCTTATGAAGTTAG | 57 | 2584 |
| 1340216 | N/A | N/A | 18971 | 18986 | GTTGACTAATGCAAGA | 59 | 2585 |
| 1340225 | N/A | N/A | 18096 | 18111 | AAATTGATACACCAAT | 14 | 2586 |
| 1340227 | N/A | N/A | 19891 | 19906 | TGCTTACGACAGGTCA | 81 | 2587 |
| 1340232 | N/A | N/A | 19656 | 19671 | ATCCATTCTATGCAAG | 46 | 2588 |
| 1340240 | 1397 | 1412 | 21212 | 21227 | AAACTTGATCTCTTAG | 61 | 2589 |
| 1340248 | 1726 | 1741 | 21541 | 21556 | CTAAAATTGTCTAAAC | 35 | 2590 |
| 1340262 | N/A | N/A | 12423 | 12438 | GGTGGTAACGGTGATC | 31 | 2591 |
| 1340281 | N/A | N/A | 20122 | 20137 | TGATTACAGCATCAAG | 69 | 2592 |
| 1340285 | 2249 | 2264 | 22064 | 22079 | GGATAGTCCATGCAAA | 64 | 2593 |
| 1340293 | 1597 | 1612 | 21412 | 21427 | TCTTATAAGACTATAA | 17 | 2594 |
| 1340299 | N/A | N/A | 14905 | 14920 | AGCTAAGAGACACTTC | 41 | 2595 |
| 1340313 | N/A | N/A | 13568 | 13583 | GAACAGTTCAACTGAA | 10 | 2596 |
| 1340326 | 1054 | 1069 | 20869 | 20884 | TATTATCAGGACTGAA | 63 | 2597 |
| 1340328 | N/A | N/A | 20382 | 20397 | TAATCACAAGTAAGGT | 54 | 2598 |
| 1340331 | N/A | N/A | 8707 | 8722 | GGGACCAATATAATCC | 31 | 2599 |
| 1340351 | N/A | N/A | 9194 | 9209 | ACAACCCTTAACAAAC | 26 | 2600 |
| 1340371 | N/A | N/A | 6479 | 6494 | CCAACTATGTAATAGG | 68 | 2601 |
| 1340378 | N/A | N/A | 9982 | 9997 | TATTAAGACAGTTGAG | 44 | 2602 |
| 1340407 | N/A | N/A | 4140 | 4155 | TTCTCAAGGAGTACTT | 76 | 2603 |
| 1340417 | N/A | N/A | 9422 | 9437 | TATATGAGGTCTGTAT | 42 | 2604 |
| 1340436 | N/A | N/A | 9765 | 9780 | CCAACCCAAGCTACCT | 15 | 2605 |
| 1340441 | N/A | N/A | 5812 | 5827 | AGTCAGTATCCCCTCA | 82 | 2606 |
| 1340442 | N/A | N/A | 5718 | 5733 | CTGCCAGATTGCACAA | 44 | 2607 |
| 1340485 | N/A | N/A | 5058 | 5073 | ATTACAGCCTTAGAGT | 56 | 2608 |
| 1340486 | N/A | N/A | 3571 | 3586 | CTATCAACCTGCACAC | 39 | 2609 |
| 1340487 | N/A | N/A | 6749 | 6764 | GCCTAGTTGCAATGAG | 61 | 2610 |
| 1340509 | N/A | N/A | 7476 | 7491 | TAACATTCGGCTAGGC | 52 | 2611 |
| 1340511 | N/A | N/A | 3933 | 3948 | CTGCGCACATATTTTA | 92 | 2612 |
| 1340516 | N/A | N/A | 5667 | 5682 | TAGAGAGCATAAGTTA | 59 | 2613 |
| 1340523 | N/A | N/A | 9927 | 9942 | TGATTGAATTCACTAT | N.D. | 2614 |
| 1340536 | N/A | N/A | 11924 | 11939 | CCAAAAATCAGCCACT | 0 | 2615 |
| 1340550 | N/A | N/A | 7768 | 7783 | GCAGCTAAAATCCAAT | 70 | 2616 |
| 1340557 | N/A | N/A | 17672 | 17687 | AACCTTTGTTGCCTGG | 36 | 2617 |
| 1340559 | N/A | N/A | 14462 | 14477 | GAGGTATGTCATACTT | 29 | 2618 |
| 1340562 | N/A | N/A | 15510 | 15525 | TATTCCAGGATTTGCT | 43 | 2619 |
| 1340564 | N/A | N/A | 3435 | 3450 | TAAGTAGATGGTAAGT | 74 | 2620 |
| 1340581 | N/A | N/A | 8613 | 8628 | GGCCAAGGGAACACTG | 36 | 2621 |
| 1340589 | 1200 | 1215 | 21015 | 21030 | ATGTTTATGTAAGCAC | 70 | 2622 |
| 1340591 | N/A | N/A | 3693 | 3708 | ATCCCGTTCTTGCCCA | 30 | 2623 |
| 1340593 | N/A | N/A | 12169 | 12184 | CCTTACCTTGTGCTTG | 20 | 2624 |
| 1340595 | N/A | N/A | 8017 | 8032 | ATCTCACAAGGGAAAT | 73 | 2625 |
| 1340596 | N/A | N/A | 6435 | 6450 | CTAGTGGTAATGGTAA | 62 | 2626 |
| 1340602 | N/A | N/A | 10206 | 10221 | TTGGTATGGTAAGCCC | 62 | 2627 |
| 1340605 | N/A | N/A | 5286 | 5301 | TATAACTGAGCTAGAC | 53 | 2628 |
| 1340621 | N/A | N/A | 9327 | 9342 | ATATACATCCAAGTAA | 18 | 2629 |
| 1340622 | N/A | N/A | 6247 | 6262 | CACTGGATGGATTTCT | 72 | 2630 |
| 1340641 | N/A | N/A | 5176 | 5191 | AGTTTAGATTGCATAA | 50 | 2631 |
| 1340644 | N/A | N/A | 16282 | 16297 | TAGTCTTCAGCAAAGT | 49 | 2632 |
| 1340652 | N/A | N/A | 14168 | 14183 | ATAGCAAGCCAACAGA | 37 | 2633 |
| 1340675 | N/A | N/A | 14201 | 14216 | ATTATTATGTGATTGA | 39 | 2634 |
| 1340682 | N/A | N/A | 9525 | 9540 | CTAGATTCTACACTAA | 17 | 2635 |
| 1340688 | N/A | N/A | 9629 | 9644 | TAGTTTGGTGGGCATG | 28 | 2636 |
| 1340699 | N/A | N/A | 20487 | 20502 | TAACTTCATAGTGGAC | 76 | 2637 |
| 1340707 | N/A | N/A | 16130 | 16145 | CTCCATAATAATAGCT | 59 | 2638 |
| 1340710 | N/A | N/A | 9962 | 9977 | GTAAGCTGAGAGTTCT | 49 | 2639 |
| 1340736 | N/A | N/A | 4640 | 4655 | TACGACTTCCTTCTAA | 67 | 2640 |
| 1340774 | N/A | N/A | 15212 | 15227 | CCATAAAGCTGGATTG | 40 | 2641 |
| 1340779 | N/A | N/A | 5992 | 6007 | AGAGGCAAGGATACCT | 78 | 2642 |
| 1340797 | N/A | N/A | 18517 | 18532 | AGTACCAAGACACTAA | 66 | 2643 |
| 1340814 | N/A | N/A | 8237 | 8252 | ACTACATGACCTGGGT | 54 | 2644 |
| 1340818 | N/A | N/A | 9077 | 9092 | ACTTGAATTCTGTGTC | 52 | 2645 |
| 1340849 | N/A | N/A | 6316 | 6331 | GACCATGCTGCTACTC | 74 | 2646 |
| 1340853 | N/A | N/A | 10978 | 10993 | CAGCATTGTAATCTTG | 43 | 2647 |
| 1340858 | N/A | N/A | 6715 | 6730 | GCCAGGGAATGCTCAT | 38 | 2648 |
| 1340860 | N/A | N/A | 12796 | 12811 | GTAAGAGTCAGTATCC | 47 | 2649 |
| 1340886 | N/A | N/A | 5888 | 5903 | TATTTCGCTACTGTAG | 48 | 2650 |
| 1340887 | N/A | N/A | 20009 | 20024 | AGAGAGTAATCAGTTT | 39 | 2651 |

TABLE 37
Inhibition of HSD17B13 RNA by 3-10-3 cEt gapmers targeting SEQ ID NO.: 1, and 2

| | SEQ | SEQ | SEQ | SEQ | | | |
|---|---|---|---|---|---|---|---|
| | ID NO: | ID NO: | ID NO: | ID NO: | | | |
| | 1 | 1 | 2 | 2 | | | SEQ |
| Compound | Start | Stop | Start | Stop | | % | ID |
| Number | Site | Site | Site | Site | Sequence (5′ to 3′) | Inhibition | NO |
| 1245927 | N/A | N/A | 3433 | 3448 | AGTAGATGGTAAGTCA | 83 | 121 |
| 1246023 | N/A | N/A | 5046 | 5061 | GAGTGAATCATTCAGT | 76 | 1526 |
| 1340073 | N/A | N/A | 12797 | 12812 | TGTAAGAGTCAGTATC | 43 | 2652 |
| 1340074 | 1203 | 1218 | 21018 | 21033 | AGTATGTTTATGTAAG | 48 | 2653 |
| 1340084 | N/A | N/A | 18692 | 18707 | GACTTTGAGACTCTTG | 65 | 2654 |
| 1340091 | N/A | N/A | 9333 | 9348 | GATCCTATATACATCC | 49 | 2655 |
| 1340101 | N/A | N/A | 11391 | 11406 | TGCAACTTTTAGTCAG | 41 | 2656 |
| 1340103 | N/A | N/A | 16383 | 16398 | ATCCCAACCAAACTTC | 15 | 2657 |
| 1340140 | 605 | 620 | 10491 | 10506 | ATATGGGATGAGGTAA | 37 | 2658 |
| 1340159 | N/A | N/A | 6029 | 6044 | TTCCGTCTCACAATCT | 79 | 2659 |
| 1340174 | N/A | N/A | 13571 | 13586 | TCAGAACAGTTCAACT | 30 | 2660 |
| 1340178 | 1598 | 1613 | 21413 | 21428 | ATCTTATAAGACTATA | 32 | 2661 |
| 1340202 | N/A | N/A | 19658 | 19673 | GAATCCATTCTATGCA | 47 | 2662 |
| 1340217 | N/A | N/A | 11579 | 11594 | AGTTATTCTCTTGACA | 48 | 2663 |
| 1340236 | N/A | N/A | 20491 | 20506 | GACATAACTTCATAGT | 39 | 2664 |
| 1340237 | N/A | N/A | 16131 | 16146 | GCTCCATAATAATAGC | 21 | 2665 |
| 1340250 | N/A | N/A | 12170 | 12185 | ACCTTACCTTGTGCTT | 0 | 2666 |
| 1340252 | N/A | N/A | 18518 | 18533 | TAGTACCAAGACACTA | 27 | 2667 |
| 1340253 | N/A | N/A | 18003 | 18018 | AAGGCTTATGAAGTTA | 61 | 2668 |
| 1340317 | N/A | N/A | 18098 | 18113 | TGAAATTGATACACCA | 58 | 2669 |
| 1340376 | N/A | N/A | 5304 | 5319 | CGGCCTATTCTTCTGT | 25 | 2670 |
| 1340389 | N/A | N/A | 7478 | 7493 | ATTAACATTCGGCTAG | 17 | 2671 |
| 1340392 | N/A | N/A | 19498 | 19513 | AATATCAGCCATCTAG | 24 | 2672 |
| 1340410 | 1074 | 1089 | 20889 | 20904 | TGCCAAACCAATGTTT | 32 | 2673 |
| 1340413 | N/A | N/A | 9195 | 9210 | GACAACCCTTAACAAA | 24 | 2674 |
| 1340447 | N/A | N/A | 3436 | 3451 | ATAAGTAGATGGTAAG | 58 | 2675 |
| 1340461 | N/A | N/A | 17676 | 17691 | TCAAAACCTTTGTTGC | 6 | 2676 |
| 1340463 | N/A | N/A | 6716 | 6731 | TGCCAGGGAATGCTCA | 23 | 2677 |
| 1340464 | N/A | N/A | 9647 | 9662 | ATGTATGAGGTCTCCG | 63 | 2678 |
| 1340477 | N/A | N/A | 13824 | 13839 | ACCAAGAGGGTTTTTA | 7 | 2679 |
| 1340495 | N/A | N/A | 4648 | 4663 | ATTTTTAATACGACTT | 35 | 2680 |
| 1340497 | N/A | N/A | 9963 | 9978 | TGTAAGCTGAGAGTTC | 45 | 2681 |
| 1340507 | N/A | N/A | 9766 | 9781 | CCCAACCCAAGCTACC | 22 | 2682 |
| 1340517 | N/A | N/A | 18983 | 18998 | CACTTTGGTATTGTTG | 53 | 2683 |
| 1340528 | N/A | N/A | 8636 | 8651 | GACTGTTGAGCTCAAA | 52 | 2684 |
| 1340537 | N/A | N/A | 5669 | 5684 | AGTAGAGAGCATAAGT | 52 | 2685 |
| 1340540 | N/A | N/A | 8040 | 8055 | GACTACATTAACACCA | 58 | 2686 |
| 1340541 | N/A | N/A | 6438 | 6453 | AAACTAGTGGTAATGG | 47 | 2687 |
| 1340568 | N/A | N/A | 20123 | 20138 | CTGATTACAGCATCAA | 40 | 2688 |
| 1340573 | N/A | N/A | 6762 | 6777 | CTTGAGAGTGATTGCC | 64 | 2689 |
| 1340579 | 2250 | 2265 | 22065 | 22080 | AGGATAGTCCATGCAA | 64 | 2690 |
| 1340592 | N/A | N/A | 10218 | 10233 | GATACAAATTTATTGG | 33 | 2691 |
| 1340598 | N/A | N/A | 5720 | 5735 | CACTGCCAGATTGCAC | 38 | 2692 |
| 1340608 | N/A | N/A | 3575 | 3590 | CTTTCTATCAACCTGC | 68 | 2693 |
| 1340615 | N/A | N/A | 14475 | 14490 | AGTATGACAACTGGAG | 15 | 2694 |
| 1340616 | N/A | N/A | 20046 | 20061 | CGTAACCATGCATTAA | 68 | 2695 |
| 1340618 | N/A | N/A | 6248 | 6263 | CCACTGGATGGATTTC | 68 | 2696 |
| 1340624 | N/A | N/A | 7772 | 7787 | GTTAGCAGCTAAAATC | 45 | 2697 |
| 1340635 | N/A | N/A | 5814 | 5829 | AAAGTCAGTATCCCCT | 77 | 2698 |
| 1340649 | N/A | N/A | 4222 | 4237 | TCAACTAAACATGACA | 77 | 2699 |
| 1340660 | N/A | N/A | 9933 | 9948 | GAATCATGATTGAATT | 39 | 2700 |
| 1340672 | N/A | N/A | 3695 | 3710 | AGATCCCGTTCTTGCC | 68 | 2701 |
| 1340676 | N/A | N/A | 5182 | 5197 | CGCAACAGTTTAGATT | 57 | 2702 |
| 1340703 | N/A | N/A | 14911 | 14926 | TTAGCAAGCTAAGAGA | 42 | 2703 |
| 1340708 | N/A | N/A | 12424 | 12439 | GGGTGGTAACGGTGAT | 46 | 2704 |
| 1340712 | N/A | N/A | 3952 | 3967 | CAAGGAAAAGCCTGAC | 59 | 2705 |
| 1340715 | N/A | N/A | 8256 | 8271 | CTGGTTTCATAACCTA | 9 | 2706 |
| 1340718 | N/A | N/A | 9423 | 9438 | TTATATGAGGTCTGTA | 32 | 2707 |
| 1340730 | N/A | N/A | 8709 | 8724 | TTGGGACCAATATAAT | 18 | 2708 |
| 1340738 | N/A | N/A | 11965 | 11980 | TGTGAGAAGGCGGTAT | 20 | 2709 |
| 1340743 | N/A | N/A | 5890 | 5905 | TGTATTTCGCTACTGT | 76 | 2710 |
| 1340754 | N/A | N/A | 16284 | 16299 | AATAGTCTTCAGCAAA | 48 | 2711 |
| 1340758 | N/A | N/A | 19904 | 19919 | AAGATACCCAGGTTGC | 59 | 2712 |
| 1340784 | N/A | N/A | 5226 | 5241 | GCTTTAGCTTAAACTC | 72 | 2713 |
| 1340787 | N/A | N/A | 9081 | 9096 | GTCCACTTGAATTCTG | 18 | 2714 |
| 1340799 | N/A | N/A | 5066 | 5081 | TGAGTTACATTACAGC | 90 | 2715 |
| 1340825 | 1748 | 1763 | 21563 | 21578 | GTGTTAGCTTTAATTT | 48 | 2716 |
| 1340844 | 1398 | 1413 | 21213 | 21228 | GAAACTTGATCTCTTA | 64 | 2717 |
| 1340851 | N/A | N/A | 9528 | 9543 | GCCCTAGATTCTACAC | 15 | 2718 |
| 1340868 | N/A | N/A | 15214 | 15229 | TTCCATAAAGCTGGAT | 5 | 2719 |
| 1340869 | N/A | N/A | 11073 | 11088 | TACAACCTGGTTTCAT | 25 | 2720 |
| 1340881 | N/A | N/A | 6321 | 6336 | AGGGAGACCATGCTGC | 79 | 2721 |
| 1340888 | N/A | N/A | 6480 | 6495 | ACCAACTATGTAATAG | 47 | 2722 |
| 1340890 | N/A | N/A | 14204 | 14219 | CAGATTATTATGTGAT | 51 | 2723 |
| 1340900 | N/A | N/A | 9989 | 10004 | GTAACTGTATTAAGAC | 54 | 2724 |
| 1340906 | N/A | N/A | 12506 | 12521 | TTCTTGCAGAAATTCA | 42 | 2725 |
| 1340912 | N/A | N/A | 14169 | 14184 | AATAGCAAGCCAACAG | 9 | 2726 |
| 1340914 | N/A | N/A | 20384 | 20399 | AGTAATCACAAGTAAG | 54 | 2727 |
| 1340915 | 794 | 809 | 15675 | 15690 | ATCTATCAGACTTCTT | 47 | 2728 |

TABLE 38
Inhibition of HSD17B13 RNA by 3-10-3 cEt gapmers targeting SEQ ID NO.: 1, and 2

| | SEQ | SEQ | SEQ | SEQ | | | |
|---|---|---|---|---|---|---|---|
| | ID NO: | ID NO: | ID NO: | ID NO: | | | |
| | 1 | 1 | 2 | 2 | | | SEQ |
| Compound | Start | Stop | Start | Stop | | % | ID |
| Number | Site | Site | Site | Site | Sequence (5′ to 3′) | Inhibition | NO |
| 1245927 | N/A | N/A | 3433 | 3448 | AGTAGATGGTAAGTCA | 84 | 121 |
| 1246023 | N/A | N/A | 5046 | 5061 | GAGTGAATCATTCAGT | 91 | 1526 |
| 1340076 | N/A | N/A | 12426 | 12441 | CAGGGTGGTAACGGTG | 55 | 2729 |
| 1340079 | N/A | N/A | 12191 | 12206 | ACCCATTCTAACTTGA | 0 | 2730 |
| 1340105 | N/A | N/A | 13825 | 13840 | TACCAAGAGGGTTTTT | 17 | 2731 |
| 1340107 | N/A | N/A | 12798 | 12813 | CTGTAAGAGTCAGTAT | 42 | 2732 |
| 1340112 | N/A | N/A | 20493 | 20508 | TTGACATAACTTCATA | 15 | 2733 |
| 1340115 | N/A | N/A | 12003 | 12018 | TGTTAGCTAAGGGAGA | 0 | 2734 |
| 1340139 | N/A | N/A | 17768 | 17783 | CAGCATATTCATTTGG | 49 | 2735 |
| 1340147 | N/A | N/A | 5831 | 5846 | TGTTAGGACCCAGTCT | 51 | 2736 |
| 1340161 | N/A | N/A | 6764 | 6779 | TTCTTGAGAGTGATTG | 52 | 2737 |
| 1340167 | N/A | N/A | 4659 | 4674 | GCCCTTAAGTCATTTT | 25 | 2738 |
| 1340173 | N/A | N/A | 11075 | 11090 | ATTACAACCTGGTTTC | 50 | 2739 |
| 1340184 | N/A | N/A | 14913 | 14928 | CATTAGCAAGCTAAGA | 0 | 2740 |
| 1340186 | N/A | N/A | 13576 | 13591 | CACTATCAGAACAGTT | 24 | 2741 |
| 1340214 | N/A | N/A | 14173 | 14188 | CTTGAATAGCAAGCCA | 25 | 2742 |
| 1340219 | N/A | N/A | 18519 | 18534 | TTAGTACCAAGACACT | 41 | 2743 |
| 1340224 | N/A | N/A | 20109 | 20124 | AAGACATTCTAGCCTG | 63 | 2744 |
| 1340242 | N/A | N/A | 12616 | 12631 | ATGGCTTAATTTTCGG | 33 | 2745 |
| 1340251 | N/A | N/A | 20190 | 20205 | AGTTATTAGAAGTCAG | 54 | 2746 |
| 1340257 | N/A | N/A | 20386 | 20401 | ATAGTAATCACAAGTA | 56 | 2747 |
| 1340267 | 1749 | 1764 | 21564 | 21579 | TGTGTTAGCTTTAATT | 38 | 2748 |
| 1340296 | N/A | N/A | 14476 | 14491 | GAGTATGACAACTGGA | 23 | 2749 |
| 1340298 | 808 | 823 | 15689 | 15704 | TTGGTAAGTATTCCAT | 20 | 2750 |
| 1340316 | 1175 | 1190 | 20990 | 21005 | TAAGAGGCATGAAAGG | 52 | 2751 |
| 1340325 | N/A | N/A | 8713 | 8728 | AGTTTTGGGACCAATA | 31 | 2752 |
| 1340343 | N/A | N/A | 11580 | 11595 | GAGTTATTCTCTTGAC | 57 | 2753 |
| 1340344 | N/A | N/A | 7479 | 7494 | AATTAACATTCGGCTA | 38 | 2754 |
| 1340365 | N/A | N/A | 16384 | 16399 | AATCCCAACCAAACTT | 23 | 2755 |
| 1340374 | N/A | N/A | 19673 | 19688 | CAAGAGACACCACCAG | 50 | 2756 |
| 1340381 | N/A | N/A | 6439 | 6454 | TAAACTAGTGGTAATG | 14 | 2757 |
| 1340383 | N/A | N/A | 5894 | 5909 | CCTTTGTATTTCGCTA | 47 | 2758 |
| 1340408 | N/A | N/A | 6326 | 6341 | TTCATAGGGAGACCAT | 65 | 2759 |
| 1340421 | N/A | N/A | 9964 | 9979 | GTGTAAGCTGAGAGTT | 60 | 2760 |
| 1340424 | N/A | N/A | 10499 | 10514 | ACTTACCAATATGGGA | 0 | 2761 |
| 1340457 | N/A | N/A | 15247 | 15262 | ATAGCTAAGTATACTT | 0 | 2762 |
| 1340480 | N/A | N/A | 18102 | 18117 | ATACTGAAATTGATAC | 11 | 2763 |
| 1340481 | N/A | N/A | 9651 | 9666 | GCTAATGTATGAGGTC | 78 | 2764 |
| 1340483 | N/A | N/A | 9112 | 9127 | AGACCAAGTAGCTTAC | 42 | 2765 |
| 1340488 | N/A | N/A | 5070 | 5085 | GATCTGAGTTACATTA | 69 | 2766 |
| 1340502 | N/A | N/A | 9999 | 10014 | GAAATCTTGTGTAACT | 69 | 2767 |
| 1340535 | N/A | N/A | 9198 | 9213 | ACTGACAACCCTTAAC | 10 | 2768 |
| 1340551 | N/A | N/A | 16285 | 16300 | GAATAGTCTTCAGCAA | 51 | 2769 |
| 1340569 | N/A | N/A | 8050 | 8065 | TTCTACAGAAGACTAC | 40 | 2770 |
| 1340583 | N/A | N/A | 9432 | 9447 | ACTAACCAATTATATG | 6 | 2771 |
| 1340611 | N/A | N/A | 16132 | 16147 | TGCTCCATAATAATAG | 35 | 2772 |
| 1340623 | 1603 | 1618 | 21418 | 21433 | AATGTATCTTATAAGA | 10 | 2773 |
| 1340632 | N/A | N/A | 18998 | 19013 | AGTCATATTGAAAATC | 39 | 2774 |
| 1340637 | N/A | N/A | 7773 | 7788 | AGTTAGCAGCTAAAAT | 33 | 2775 |
| 1340639 | N/A | N/A | 5185 | 5200 | CAACGCAACAGTTTAG | 52 | 2776 |
| 1340656 | N/A | N/A | 10258 | 10273 | AGCATTCCATGATTAA | 47 | 2777 |
| 1340658 | N/A | N/A | 18005 | 18020 | CCAAGGCTTATGAAGT | 27 | 2778 |
| 1340662 | N/A | N/A | 8279 | 8294 | TCTAAAGTGCTGGTTG | 34 | 2779 |
| 1340663 | N/A | N/A | 6482 | 6497 | GCACCAACTATGTAAT | 53 | 2780 |
| 1340666 | N/A | N/A | 3697 | 3712 | TCAGATCCCGTTCTTG | 59 | 2781 |
| 1340702 | N/A | N/A | 3584 | 3599 | CTCCTGAGTCTTTCTA | 23 | 2782 |
| 1340714 | N/A | N/A | 5227 | 5242 | TGCTTTAGCTTAAACT | 51 | 2783 |
| 1340720 | N/A | N/A | 19531 | 19546 | GCTAAAATGGTCATCT | 40 | 2784 |
| 1340721 | 2356 | 2371 | 22171 | 22186 | TTTATAACTACAAGAG | 38 | 2785 |
| 1340732 | N/A | N/A | 8639 | 8654 | ACAGACTGTTGAGCTC | 53 | 2786 |
| 1340733 | 1254 | 1269 | 21069 | 21084 | TTTTGTCCACCTTTAA | 68 | 2787 |
| 1340735 | N/A | N/A | 9334 | 9349 | CGATCCTATATACATC | 33 | 2788 |
| 1340745 | N/A | N/A | 9767 | 9782 | TCCCAACCCAAGCTAC | 8 | 2789 |
| 1340760 | N/A | N/A | 19905 | 19920 | TAAGATACCCAGGTTG | 39 | 2790 |
| 1340764 | N/A | N/A | 3478 | 3493 | GACCAGGGAATTTATC | 41 | 2791 |
| 1340766 | N/A | N/A | 9934 | 9949 | TGAATCATGATTGAAT | 38 | 2792 |
| 1340793 | N/A | N/A | 5646 | 5661 | GCATTCATCAGATGTT | 89 | 2793 |
| 1340794 | N/A | N/A | 6717 | 6732 | CTGCCAGGGAATGCTC | 23 | 2794 |
| 1340796 | N/A | N/A | 6033 | 6048 | ACTTTTCCGTCTCACA | 89 | 2795 |
| 1340806 | N/A | N/A | 5671 | 5686 | TCAGTAGAGAGCATAA | 52 | 2796 |
| 1340809 | 1417 | 1432 | 21232 | 21247 | TGAGATAAAGCTGCCT | 63 | 2797 |
| 1340827 | N/A | N/A | 5732 | 5747 | TGGTAGCTTGCTCACT | 71 | 2798 |
| 1340829 | N/A | N/A | 6249 | 6264 | GCCACTGGATGGATTT | 36 | 2799 |
| 1340856 | N/A | N/A | 11392 | 11407 | CTGCAACTTTTAGTCA | 21 | 2800 |
| 1340862 | N/A | N/A | 9530 | 9545 | CTGCCCTAGATTCTAC | 33 | 2801 |
| 1340867 | N/A | N/A | 14263 | 14278 | GAGTTAGGGAGCCAGC | 39 | 2802 |
| 1340882 | N/A | N/A | 4223 | 4238 | TTCAACTAAACATGAC | 55 | 2803 |
| 1340897 | N/A | N/A | 18693 | 18708 | AGACTTTGAGACTCTT | 57 | 2804 |
| 1340911 | N/A | N/A | 3988 | 4003 | GTTTACAAGTAAGAAC | 42 | 2805 |

[0523] Modified oligonucleotides complementary to an HSD17B13 nucleic acid with other chemistry modifications were synthesized and tested for their effect on HSD17B13 RNA levels in vitro, as described above. The Chemistry Notation column in the Tables below specifies the chemistry of each modified oligonucleotide; wherein subscript ‘d’ represents a 2′-β-D-deoxyribosyl sugar moiety, subscript ‘e’ represents a 2′-MOE sugar moiety, subscript ‘y’ represents a 2′-O-methyl sugar moiety, subscript ‘k’ represents a cEt modified sugar moiety, subscript ‘s’ represents a phosphorothioate internucleoside linkage, and superscript ‘m’ before the cytosine residue represents a 5-methyl cytosine.

TABLE 39
Inhibition of HSD17B13 RNA by modified oligonucleotides targeting SEQ ID NO.: 1, and 2

| | SEQ ID | SEQ ID | SEQ ID | SEQ ID | | | | |
|---|---|---|---|---|---|---|---|---|
| | NO: 1 | NO: 1 | NO: 2 | NO: 2 | | | | SEQ |
| Compound | Start | Stop | Start | Stop | Sequence | Chemistry Notation | % | ID |
| Number | Site | Site | Site | Site | (5' to 3') | (5' to 3') | Inhibition | NO |
| 1245927 | N/A | N/A | 3433 | 3448 | AGTAGATGGTAAGTCA | AₖₛGₖₛTₖₛA_{ds}G_{ds}A_{ds}T_{ds}G_{ds}G_{ds} | 78 | 121 |
| | | | | | | T_{ds}A_{ds}A_{ds}G_{ds}Tₖₛ^{m}CₖₛAₖ | | |
| 1246023 | N/A | N/A | 5046 | 5061 | GAGTGAATCATTCAGT | GₖₛAₖₛGₖₛT_{ds}G_{ds}A_{ds}A_{ds}T_{ds}^{m} | 78 | 1526 |
| | | | | | | C_{ds}A_{ds}T_{ds}T_{ds}^{m}C_{ds}AₖₛGₖₛTₖ | | |
| 1341171 | 700 | 715 | 12118 | 12133 | CAGAGACATGAGGTTT | ^{m}CₖₛAₖₛG_{ds}A_{ds}G_{ds}A_{ds}^{m}C_{ds}A_{ds} | 61 | 2319 |
| | | | | | | T_{ds}G_{ds}A_{ds}GₖₛGₑₛTₖₛTₑₛTₖ | | |
| 1341175 | 794 | 809 | 15675 | 15690 | ATCTATCAGACTTCTT | AₖₛTₖₛ^{m}C_{ds}T_{ds}A_{ds}T_{ds}^{m}C_{ds}A_{ds} | 37 | 2728 |
| | | | | | | G_{ds}A_{ds}^{m}C_{ds}TₖₛTₑₛ^{m}CₖₛTₑₛTₖ | | |
| 1341179 | 606 | 621 | 10492 | 10507 | AATATGGGATGAGGTA | AₖₛAₖₛT_{ds}A_{ds}T_{ds}G_{ds}G_{ds}G_{ds}A_{ds} | 52 | 1424 |
| | | | | | | T_{ds}G_{ds}AₖₛGₑₛGₖₛTₑₛAₖ | | |
| 1341180 | 1080 | 1095 | 20895 | 20910 | TGCTAGTGCCAAACCA | TₖₛGₖₛ^{m}C_{ds}T_{ds}A_{ds}G_{ds}T_{ds}G_{ds}^{m} | 58 | 1432 |
| | | | | | | C_{ds}^{m}C_{ds}A_{ds}AₖₛAₑₛ^{m}Cₖₛ^{m}CₑₛAₖ | | |
| 1341189 | 1019 | 1034 | 20834 | 20849 | TGCAGCATTGATTCGA | TₖₛGₖₛ^{m}C_{ds}A_{ds}G_{ds}^{m}C_{ds}A_{ds}T_{ds} | 42 | 419 |
| | | | | | | T_{ds}G_{ds}A_{ds}TₖₛTₑₛ^{m}CₖₛGₑₛAₖ | | |
| 1341190 | 1258 | 1273 | 21073 | 21088 | TAGCTTTTGTCCACCT | TₖₛAₖₛG_{ds}^{m}C_{ds}T_{ds}T_{ds}T_{ds}T_{ds}G_{ds} | 71 | 1900 |
| | | | | | | T_{ds}^{m}C_{ds}^{m}CₖₛAₑₛ^{m}Cₖₛ^{m}CₑₛTₖ | | |
| 1341193 | 1202 | 1217 | 21017 | 21032 | GTATGTTTATGTAAGC | GₖₛTₖₛA_{ds}T_{ds}G_{ds}T_{ds}T_{ds}T_{ds}A_{ds} | 72 | 1511 |
| | | | | | | T_{ds}G_{ds}TₖₛAₑₛAₖₛGₑₛ^{m}Cₖ | | |
| 1341198 | 1084 | 1099 | 20899 | 20914 | CTGCTGCTAGTGCCAA | ^{m}CₖₛTₖₛG_{ds}^{m}C_{ds}T_{ds}G_{ds}^{m}C_{ds}T_{ds} | 44 | 1743 |
| | | | | | | A_{ds}G_{ds}T_{ds}Gₖₛ^{m}Cₑₛ^{m}CₖₛAₑₛAₖ | | |
| 1341200 | 1316 | 1331 | 21131 | 21146 | AACAGTCTTAAACCTT | AₖₛAₖₛ^{m}C_{ds}A_{ds}G_{ds}T_{ds}^{m}C_{ds}T_{ds} | 37 | 188 |
| | | | | | | T_{ds}A_{ds}A_{ds}Aₖₛ^{m}Cₑₛ^{m}CₖₛTₑₛTₖ | | |
| 1341213 | 1324 | 1339 | 21139 | 21154 | GCTACTTGAACAGTCT | Gₖₛ^{m}CₖₛT_{ds}A_{ds}^{m}C_{ds}T_{ds}T_{ds}G_{ds} | 64 | 811 |
| | | | | | | A_{ds}A_{ds}^{m}C_{ds}AₖₛGₑₛTₖₛ^{m}CₑₛTₖ | | |
| 1341217 | 1312 | 1327 | 21127 | 21142 | GTCTTAAACCTTCCCT | GₖₛTₖₛ^{m}C_{ds}T_{ds}T_{ds}A_{ds}A_{ds}A_{ds}^{m} | 28 | 1901 |
| | | | | | | C_{ds}^{m}C_{ds}T_{ds}Tₖₛ^{m}Cₑₛ^{m}Cₖₛ^{m}CₑₛTₖ | | |
| 1341228 | 1333 | 1348 | 21148 | 21163 | GATTGGAATGCTACTT | GₖₛAₖₛT_{ds}T_{ds}G_{ds}G_{ds}A_{ds}A_{ds}T_{ds} | 53 | 1435 |
| | | | | | | G_{ds}^{m}C_{ds}TₖₛAₑₛ^{m}CₖₛTₑₛTₖ | | |
| 1341234 | 1356 | 1371 | 21171 | 21186 | TGATATTCTGTGGCAT | TₖₛGₖₛA_{ds}T_{ds}A_{ds}T_{ds}T_{ds}^{m}C_{ds}T_{ds} | 46 | 1124 |
| | | | | | | G_{ds}T_{ds}GₖₛGₑₛ^{m}CₖₛAₑₛTₖ | | |
| 1341236 | 1352 | 1367 | 21167 | 21182 | ATTCTGTGGCATGGCT | AₖₛTₖₛT_{ds}^{m}C_{ds}T_{ds}G_{ds}T_{ds}G_{ds}G_{ds} | 55 | 2328 |
| | | | | | | ^{m}C_{ds}A_{ds}TₖₛGₑₛGₖₛ^{m}CₑₛTₖ | | |
| 1341239 | 1340 | 1355 | 21155 | 21170 | GGCTACAGATTGGAAT | GₖₛGₖₛ^{m}C_{ds}T_{ds}A_{ds}^{m}C_{ds}A_{ds}G_{ds} | 73 | 1980 |
| | | | | | | A_{ds}T_{ds}T_{ds}GₖₛGₑₛAₖₛAₑₛTₖ | | |
| 1341241 | 1387 | 1402 | 21202 | 21217 | TCTTAGCTGTGCACTC | Tₖₛ^{m}CₖₛT_{ds}T_{ds}A_{ds}G_{ds}^{m}C_{ds}T_{ds}G | 50 | 190 |
| | | | | | | _{ds}T_{ds}G_{ds}^{m}CₖₛAₑₛ^{m}CₖₛTₑₛ^{m}Cₖ | | |
| 1341247 | 1364 | 1379 | 21179 | 21194 | GTTCTTGTTGATATTC | GₖₛTₖₛT_{ds}^{m}C_{ds}T_{ds}T_{ds}G_{ds}T_{ds}T_{ds} | 66 | 1436 |
| | | | | | | G_{ds}A_{ds}TₖₛAₑₛTₖₛTₑₛ^{m}Cₖ | | |
| 1341250 | 1393 | 1408 | 21208 | 21223 | TTGATCTCTTAGCTGT | TₖₛTₖₛG_{ds}A_{ds}T_{ds}^{m}C_{ds}T_{ds}^{m}C_{ds} | 38 | 658 |
| | | | | | | T_{ds}T_{ds}A_{ds}Gₖₛ^{m}CₑₛTₖₛGₑₛTₖ | | |
| 1341258 | 1420 | 1435 | 21235 | 21250 | GGTTGAGATAAAGCTG | GₖₛGₖₛT_{ds}T_{ds}G_{ds}A_{ds}G_{ds}A_{ds}T_{ds} | 60 | 1826 |
| | | | | | | A_{ds}A_{ds}AₖₛGₑₛ^{m}CₖₛTₑₛGₖ | | |
| 1341263 | 1489 | 1504 | 21304 | 21319 | CGTTTTGGGCTAATGA | ^{m}CₖₛGₖₛT_{ds}T_{ds}T_{ds}T_{ds}G_{ds}G_{ds}G_{ds} | 37 | 1282 |
| | | | | | | ^{m}C_{ds}T_{ds}AₖₛAₑₛTₖₛGₑₛAₖ | | |
| 1341267 | 1493 | 1508 | 21308 | 21323 | GCACCGTTTTGGGCTA | Gₖₛ^{m}CₖₛA_{ds}^{m}C_{ds}^{m}C_{ds}G_{ds}T_{ds}T_{ds} | 49 | 1593 |
| | | | | | | T_{ds}T_{ds}G_{ds}GₖₛGₑₛ^{m}CₖₛTₑₛAₖ | | |
| 1341274 | 1497 | 1512 | 21312 | 21327 | AGTTGCACCGTTTTGG | AₖₛGₖₛT_{ds}T_{ds}G_{ds}^{m}C_{ds}A_{ds}^{m}C_{ds}^{m} | 41 | 1905 |
| | | | | | | C_{ds}G_{ds}T_{ds}TₖₛTₑₛTₖₛGₑₛGₖ | | |
| 1341280 | 1622 | 1637 | 21437 | 21452 | AGAGTCGGTCACCTTT | AₖₛGₖₛA_{ds}G_{ds}T_{ds}^{m}C_{ds}G_{ds}G_{ds} | 61 | 428 |
| | | | | | | T_{ds}^{m}C_{ds}A_{ds}^{m}Cₖₛ^{m}CₑₛTₖₛTₑₛTₖ | | |
| 1341281 | 1630 | 1645 | 21445 | 21460 | TTTAAAATAGAGTCGG | TₖₛTₖₛT_{ds}A_{ds}A_{ds}A_{ds}A_{ds}T_{ds}A_{ds} | 43 | 1051 |
| | | | | | | G_{ds}A_{ds}GₖₛTₑₛ^{m}CₖₛGₑₛGₖ | | |
| 1341287 | 1618 | 1633 | 21433 | 21448 | TCGGTCACCTTTCATA | Tₖₛ^{m}CₖₛG_{ds}G_{ds}T_{ds}^{m}C_{ds}A_{ds}^{m}C_{ds} | 63 | 116 |
| | | | | | | ^{m}C_{ds}T_{ds}T_{ds}Tₖₛ^{m}CₑₛAₖₛTₑₛAₖ | | |
| 1341290 | 1626 | 1641 | 21441 | 21456 | AAATAGAGTCGGTCAC | AₖₛAₖₛA_{ds}T_{ds}A_{ds}G_{ds}A_{ds}G_{ds}T_{ds} | 50 | 740 |
| | | | | | | ^{m}C_{ds}G_{ds}GₖₛTₑₛ^{m}CₖₛAₑₛ^{m}Cₖ | | |
| 1341296 | 1714 | 1729 | 21529 | 21544 | AAACATCTCTGGGACC | AₖₛAₖₛA_{ds}^{m}C_{ds}A_{ds}T_{ds}^{m}C_{ds}T_{ds}^{m} | 36 | 2129 |
| | | | | | | C_{ds}T_{ds}G_{ds}GₖₛGₑₛAₖₛ^{m}Cₑₛ^{m}Cₖ | | |
| 1341297 | 1710 | 1725 | 21525 | 21540 | ATCTCTGGGACCAAGG | AₖₛTₖₛ^{m}C_{ds}T_{ds}^{m}C_{ds}T_{ds}G_{ds}G_{ds}G | 65 | 37 |
| | | | | | | _{ds}A_{ds}^{m}C_{ds}^{m}CₖₛAₑₛAₖₛGₑₛGₖ | | |
| 1341303 | 1768 | 1783 | 21583 | 21598 | CCAGTACAGTTCCTTT | ^{m}Cₖₛ^{m}CₖₛA_{ds}G_{ds}T_{ds}A_{ds}^{m}C_{ds}A_{ds} | 75 | 1753 |
| | | | | | | G_{ds}T_{ds}T_{ds}^{m}Cₖₛ^{m}CₑₛTₖₛTₑₛTₖ | | |
| 1341305 | 1750 | 1765 | 21565 | 21580 | CTGTGTTAGCTTTAAT | ^{m}CₖₛTₖₛG_{ds}T_{ds}G_{ds}T_{ds}T_{ds}A_{ds}G_{ds} | 47 | 1286 |
| | | | | | | ^{m}C_{ds}T_{ds}TₖₛTₑₛAₖₛAₑₛTₖ | | |
| 1341313 | 1778 | 1793 | 21593 | 21608 | TATGTAATAGCCAGTA | TₖₛAₖₛT_{ds}G_{ds}T_{ds}A_{ds}A_{ds}T_{ds}A_{ds} | 78 | 508 |
| | | | | | | G_{ds}^{m}C_{ds}^{m}CₖₛAₑₛGₖₛTₑₛAₖ | | |
| 1341315 | 1782 | 1797 | 21597 | 21612 | TTCTTATGTAATAGCC | TₖₛTₖₛ^{m}C_{ds}T_{ds}T_{ds}A_{ds}T_{ds}G_{ds}T_{ds} | 78 | 819 |
| | | | | | | A_{ds}A_{ds}TₖₛAₑₛGₖₛ^{m}Cₑₛ^{m}Cₖ | | |
| 1341325 | 2247 | 2262 | 22062 | 22077 | ATAGTCCATGCAAAAG | AₖₛTₖₛA_{ds}G_{ds}T_{ds}^{m}C_{ds}^{m}C_{ds}A_{ds} | 31 | 2436 |
| | | | | | | T_{ds}G_{ds}^{m}C_{ds}AₖₛAₑₛAₖₛAₑₛGₖ | | |
| 1341328 | 2193 | 2208 | 22008 | 22023 | TAGTCTTGATGTAGTG | TₖₛAₖₛG_{ds}T_{ds}^{m}C_{ds}T_{ds}T_{ds}G_{ds}A_{ds} | 43 | 1288 |
| | | | | | | T_{ds}G_{ds}TₖₛAₑₛGₖₛTₑₛGₖ | | |
| 1341339 | N/A | N/A | 9330 | 9345 | CCTATATACATCCAAG | ^{m}Cₖₛ^{m}CₖₛT_{ds}A_{ds}T_{ds}A_{ds}T_{ds}A_{ds}^{m} | 61 | 1771 |
| | | | | | | C_{ds}A_{ds}T_{ds}^{m}Cₖₛ^{m}CₑₛAₖₛAₑₛGₖ | | |
| 1341343 | N/A | N/A | 11571 | 11586 | TCTTGACAATGGTTGA | Tₖₛ^{m}CₖₛT_{ds}T_{ds}G_{ds}A_{ds}^{m}C_{ds}A_{ds} | 40 | 2440 |
| | | | | | | A_{ds}T_{ds}G_{ds}GₖₛTₑₛTₖₛGₑₛAₖ | | |
| 1341344 | N/A | N/A | 11855 | 11870 | TAAGCAGAATTGTGAA | TₖₛAₖₛA_{ds}G_{ds}^{m}C_{ds}A_{ds}G_{ds}A_{ds} | 29 | 2361 |
| | | | | | | A_{ds}T_{ds}T_{ds}GₖₛTₑₛGₖₛAₑₛAₖ | | |
| 1341347 | N/A | N/A | 9964 | 9979 | GTGTAAGCTGAGAGTT | GₖₛTₖₛG_{ds}T_{ds}A_{ds}A_{ds}G_{ds}^{m}C_{ds} | 57 | 2760 |
| | | | | | | T_{ds}G_{ds}A_{ds}GₖₛAₑₛGₖₛTₑₛTₖ | | |
| 1341351 | N/A | N/A | 12423 | 12438 | GGTGGTAACGGTGATC | GₖₛGₖₛT_{ds}G_{ds}G_{ds}T_{ds}A_{ds}A_{ds}^{m} | 39 | 2591 |
| | | | | | | C_{ds}G_{ds}G_{ds}TₖₛGₑₛAₖₛTₑₛ^{m}Cₖ | | |
| 1341354 | N/A | N/A | 14914 | 14929 | ACATTAGCAAGCTAAG | Aₖₛ^{m}CₖₛA_{ds}T_{ds}T_{ds}A_{ds}G_{ds}^{m}C_{ds} | 23 | 2065 |
| | | | | | | A_{ds}A_{ds}G_{ds}^{m}CₖₛTₑₛAₖₛAₑₛGₖ | | |
| 1341360 | N/A | N/A | 15494 | 15509 | GCATTAATGCCACCCT | Gₖₛ^{m}CₖₛA_{ds}T_{ds}T_{ds}A_{ds}A_{ds}T_{ds}G_{ds} | 24 | 1012 |
| | | | | | | ^{m}C_{ds}^{m}C_{ds}Aₖₛ^{m}Cₑₛ^{m}Cₖₛ^{m}CₑₛTₖ | | |
| 1341361 | N/A | N/A | 16287 | 16302 | TAGAATAGTCTTCAGC | TₖₛAₖₛG_{ds}A_{ds}A_{ds}T_{ds}A_{ds}G_{ds}T_{ds} | 50 | 1403 |
| | | | | | | ^{m}C_{ds}T_{ds}Tₖₛ^{m}CₑₛAₖₛGₑₛ^{m}Cₖ | | |
| 1341375 | N/A | N/A | 17992 | 18007 | AGTTAGTATAGTTATC | AₖₛGₖₛT_{ds}T_{ds}A_{ds}G_{ds}T_{ds}A_{ds}T_{ds} | 47 | 1249 |
| | | | | | | A_{ds}G_{ds}TₖₛTₑₛAₖₛTₑₛ^{m}Cₖ | | |
| 1341377 | N/A | N/A | 16380 | 16395 | CCAACCAAACTTCCAG | ^{m}Cₖₛ^{m}CₖₛA_{ds}A_{ds}^{m}c_{ds}^{m}C_{ds}A_{ds} | 15 | 2539 |
| | | | | | | A_{ds}A_{ds}^{m}C_{ds}T_{ds}Tₖₛ^{m}Cₑₛ^{m}CₖₛAₑₛGₖ | | |
| 1341382 | N/A | N/A | 19908 | 19923 | TCTTAAGATACCCAGG | Tₖₛ^{m}CₖₛT_{ds}T_{ds}A_{ds}A_{ds}G_{ds}A_{ds}T_{ds} | 35 | 319 |
| | | | | | | A_{ds}^{m}C_{ds}^{m}Cₖₛ^{m}CₑₛAₖₛGₑₛGₖ | | |
| 1341387 | N/A | N/A | 18693 | 18708 | AGACTTTGAGACTCTT | AₖₛGₖₛA_{ds}^{m}C_{ds}T_{ds}T_{ds}T_{ds}G_{ds}A_{ds} | 55 | 2804 |
| | | | | | | G_{ds}A_{ds}^{m}CₖₛTₑₛ^{m}CₖₛTₑₛTₖ | | |
| 1341389 | N/A | N/A | 19912 | 19927 | TGCATCTTAAGATACC | TₖₛGₖₛ^{m}C_{ds}A_{ds}T_{ds}^{m}C_{ds}T_{ds}T_{ds} | 24 | 2050 |
| | | | | | | A_{ds}A_{ds}G_{ds}AₖₛTₑₛAₖₛ^{m}Cₑₛ^{m}Cₖ | | |
| 1341393 | N/A | N/A | 20381 | 20396 | AATCACAAGTAAGGTA | AₖₛAₖₛT_{ds}^{m}C_{ds}A_{ds}^{m}C_{ds}A_{ds}A_{ds} | 59 | 1333 |
| | | | | | | G_{ds}T_{ds}A_{ds}AₖₛGₑₛGₖₛTₑₛAₖ | | |
| 1341396 | N/A | N/A | 20116 | 20131 | CAGCATCAAGACATTC | ^{m}CₖₛAₖₛG_{ds}^{m}C_{ds}A_{ds}T_{ds}^{m}C_{ds}A_{ds} | 62 | 2191 |
| | | | | | | A_{ds}G_{ds}A_{ds}^{m}CₖₛAₑₛTₖₛTₑₛ^{m}Cₖ | | |
| 1341406 | N/A | N/A | 12503 | 12518 | TTGCAGAAATTCACCT | TₖₛTₖₛG_{ds}^{m}C_{ds}A_{ds}G_{ds}A_{ds}A_{ds} | 46 | 2528 |
| | | | | | | A_{ds}T_{ds}T_{ds}^{m}CₖₛAₑₛ^{m}Cₖₛ^{m}CₑₛTₖ | | |
| 1341407 | N/A | N/A | 20482 | 20497 | TCATAGTGGACTTCAT | Tₖₛ^{m}CₖₛA_{ds}T_{ds}A_{ds}G_{ds}T_{ds}G_{ds} | 48 | 633 |
| | | | | | | G_{ds}A_{ds}^{m}C_{ds}TₖₛTₑₛ^{m}CₖₛAₑₛTₖ | | |
| 1341412 | N/A | N/A | 14196 | 14211 | TATGTGATTGAGTTCT | TₖₛAₖₛT_{ds}G_{ds}T_{ds}G_{ds}A_{ds}T_{ds}T_{ds} | 23 | 2367 |
| | | | | | | G_{ds}A_{ds}GₖₛTₑₛTₖₛ^{m}CₑₛTₖ | | |
| 1341415 | N/A | N/A | 13952 | 13967 | TCTAAGTTAGCCCCCA | Tₖₛ^{m}CₖₛT_{ds}A_{ds}A_{ds}G_{ds}T_{ds}T_{ds}A_{ds} | 19 | 928 |
| | | | | | | G_{ds}^{m}C_{ds}^{m}Cₖₛ^{m}Cₑₛ^{m}Cₖₛ^{m}CₑₛAₖ | | |
| 1341417 | N/A | N/A | 14170 | 14185 | GAATAGCAAGCCAACA | GₖₛAₖₛA_{ds}T_{ds}A_{ds}G_{ds}^{m}C_{ds}A_{ds} | 27 | 1708 |
| | | | | | | A_{ds}G_{ds}^{m}C_{ds}^{m}CₖₛAₑₛAₖₛ^{m}CₑₛAₖ | | |
| 1341532 | 805 | 820 | 15686 | 15701 | GTAAGTATTCCATCTA | GₖₛTₖₛA_{ds}A_{ds}G_{ds}T_{ds}A_{ds}T_{ds}T_{ds} | 53 | 1038 |
| | | | | | | ^{m}C_{ds}^{m}C_{ds}AₖₛTₑₛ^{m}CₖₛTₑₛAₖ | | |
| 1341534 | 613 | 628 | N/A | N/A | CTGGAACAATATGGGA | ^{m}CₖₛTₖₛG_{ds}G_{ds}A_{ds}A_{ds}^{m}C_{ds}A_{ds} | 33 | 1969 |
| | | | | | | A_{ds}T_{ds}A_{ds}TₖₛGₑₛGₖₛGₑₛAₖ | | |
| 1341538 | 1091 | 1106 | 20906 | 20921 | CGTTTGACTGCTGCTA | ^{m}CₖₛGₖₛT_{ds}T_{ds}T_{ds}G_{ds}A_{ds}^{m}C_{ds} | 48 | 264 |
| | | | | | | T_{ds}G_{ds}^{m}C_{ds}TₖₛGₑₛ^{m}CₖₛTₑₛAₖ | | |
| 1341541 | 1320 | 1335 | 21135 | 21150 | CTTGAACAGTCTTAAA | ^{m}CₖₛTₖₛT_{ds}G_{ds}A_{ds}A_{ds}^{m}C_{ds}A_{ds} | 38 | 500 |
| | | | | | | G_{ds}T_{ds}^{m}C_{ds}TₖₛTₑₛAₖₛAₑₛAₖ | | |
| 1341543 | 1308 | 1323 | 21123 | 21138 | TAAACCTTCCCTGTGT | TₖₛAₖₛA_{ds}A_{ds}^{m}C_{ds}^{m}C_{ds}T_{ds}T_{ds}^{m} | 9 | 1745 |
| | | | | | | C_{ds}^{m}C_{ds}^{m}C_{ds}TₖₛGₑₛTₖₛGₑₛTₖ | | |
| 1341547 | 1076 | 1091 | 20891 | 20906 | AGTGCCAAACCAATGT | AₖₛGₖₛT_{ds}G_{ds}^{m}C_{ds}^{m}C_{ds}A_{ds}A_{ds} | 71 | 1120 |
| | | | | | | A_{ds}^{m}C_{ds}^{m}C_{ds}AₖₛAₑₛTₖₛGₑₛTₖ | | |
| 1341551 | 1347 | 1362 | 21162 | 21177 | GTGGCATGGCTACAGA | GₖₛTₖₛG_{ds}G_{ds}^{m}C_{ds}A_{ds}T_{ds}G_{ds} | 59 | 501 |
| | | | | | | G_{ds}^{m}C_{ds}T_{ds}Aₖₛ^{m}CₑₛAₖₛGₑₛAₖ | | |
| 1341555 | 1328 | 1343 | 21143 | 21158 | GAATGCTACTTGAACA | GₖₛAₖₛA_{ds}T_{ds}G_{ds}^{m}C_{ds}T_{ds}A_{ds}^{m} | 48 | 1123 |
| | | | | | | C_{ds}T_{ds}T_{ds}GₖₛAₑₛAₖₛ^{m}CₑₛAₖ | | |
| 1341564 | 1425 | 1440 | 21240 | 21255 | GTCCAGGTTGAGATAA | GₖₛTₖₛ^{m}C_{ds}^{m}C_{ds}A_{ds}G_{ds}G_{ds}T_{ds} | 36 | 113 |
| | | | | | | T_{ds}G_{ds}A_{ds}GₖₛAₑₛTₖₛAₑₛAₖ | | |
| 1341565 | 1461 | 1476 | 21276 | 21291 | CTAGGGAAATCTTTCA | ^{m}CₖₛTₖₛA_{ds}G_{ds}G_{ds}G_{ds}A_{ds}A_{ds} | 46 | 659 |
| | | | | | | A_{ds}T_{ds}^{m}C_{ds}TₖₛTₑₛTₖₛ^{m}CₑₛAₖ | | |
| 1341567 | 1415 | 1430 | 21230 | 21245 | AGATAAAGCTGCCTGC | AₖₛGₖₛA_{ds}T_{ds}A_{ds}A_{ds}A_{ds}G_{ds}^{m} | 30 | 1515 |
| | | | | | | C_{ds}T_{ds}G_{ds}^{m}Cₖₛ^{m}CₑₛTₖₛGₑₛ^{m}Cₖ | | |
| 1341568 | 1718 | 1733 | 21533 | 21548 | GTCTAAACATCTCTGG | GₖₛTₖₛ^{m}C_{ds}T_{ds}A_{ds}A_{ds}A_{ds}^{m}C_{ds} | 50 | 429 |
| | | | | | | A_{ds}T_{ds}^{m}C_{ds}Tₖₛ^{m}CₑₛTₖₛGₑₛGₖ | | |
| 1341569 | 1504 | 1519 | 21319 | 21334 | AGAATAGAGTTGCACC | AₖₛGₖₛA_{ds}A_{ds}T_{ds}A_{ds}G_{ds}A_{ds}G_{ds} | 59 | 426 |
| | | | | | | T_{ds}T_{ds}Gₖₛ^{m}CₑₛAₖₛ^{m}Cₑₛ^{m}Cₖ | | |
| 1341575 | 1614 | 1629 | 21429 | 21444 | TCACCTTTCATAATGT | Tₖₛ^{m}CₖₛA_{ds}^{m}C_{ds}^{m}C_{ds}T_{ds}T_{ds}T_{ds} | 31 | 2109 |
| | | | | | | ^{m}C_{ds}A_{ds}T_{ds}AₖₛAₑₛTₖₛGₑₛTₖ | | |
| 1341578 | 2186 | 2201 | 22001 | 22016 | GATGTAGTGGGAGTCG | GₖₛAₖₛT_{ds}G_{ds}T_{ds}A_{ds}G_{ds}T_{ds}G_{ds} | 38 | 743 |
| | | | | | | G_{ds}G_{ds}AₖₛGₑₛTₖₛ^{m}CₑₛGₖ | | |
| 1341580 | 2257 | 2272 | 22072 | 22087 | AAACAAGAGGATAGTC | AₖₛAₖₛA_{ds}^{m}C_{ds}A_{ds}A_{ds}G_{ds}A_{ds} | 52 | 744 |
| | | | | | | G_{ds}G_{ds}A_{ds}TₖₛAₑₛGₖₛTₑₛ^{m}Cₖ | | |
| 1341585 | 1774 | 1789 | 21589 | 21604 | TAATAGCCAGTACAGT | TₖₛAₖₛA_{ds}T_{ds}A_{ds}G_{ds}^{m}C_{ds}^{m}C_{ds} | 44 | 196 |
| | | | | | | A_{ds}G_{ds}T_{ds}Aₖₛ^{m}CₑₛAₖₛGₑₛTₖ | | |
| 1341588 | N/A | N/A | 9511 | 9526 | AATATTGAGGCACTGG | AₖₛAₖₛT_{ds}A_{ds}T_{ds}T_{ds}G_{ds}A_{ds}G_{ds} | 29 | 1538 |
| | | | | | | G_{ds}^{m}C_{ds}Aₖₛ^{m}CₑₛTₖₛGₑₛGₖ | | |
| 1341596 | N/A | N/A | 9598 | 9613 | ATGTGAAGAGCTGGTA | AₖₛTₖₛG_{ds}T_{ds}G_{ds}A_{ds}A_{ds}G_{ds}A_{ds} | 54 | 527 |
| | | | | | | G_{ds}^{m}C_{ds}TₖₛGₑₛGₖₛTₑₛAₖ | | |
| 1341603 | N/A | N/A | 16134 | 16149 | GATGCTCCATAATAAT | GₖₛAₖₛT_{ds}G_{ds}^{m}C_{ds}T_{ds}^{m}C_{ds}^{m}C_{ds} | 17 | 2049 |
| | | | | | | A_{ds}T_{ds}A_{ds}AₖₛTₑₛAₖₛAₑₛTₖ | | |
| 1341604 | N/A | N/A | 16124 | 16139 | AATAATAGCTCTATTG | AₖₛAₖₛT_{ds}A_{ds}A_{ds}T_{ds}A_{ds}G_{ds}^{m} | 2 | 2410 |
| | | | | | | C_{ds}T_{ds}^{m}C_{ds}TₖₛAₑₛTₖₛTₑₛGₖ | | |
| 1341614 | N/A | N/A | 17987 | 18002 | GTATAGTTATCTTCTC | GₖₛTₖₛA_{ds}T_{ds}A_{ds}G_{ds}T_{ds}T_{ds}A_{ds} | 49 | 937 |
| | | | | | | T_{ds}^{m}C_{ds}TₖₛTₑₛ^{m}CₖₛTₑₛ^{m}Cₖ | | |
| 1341615 | N/A | N/A | 17997 | 18012 | TATGAAGTTAGTATAG | TₖₛAₖₛT_{ds}G_{ds}A_{ds}A_{ds}G_{ds}T_{ds}T_{ds} | 47 | 1560 |
| | | | | | | A_{ds}G_{ds}TₖₛAₑₛTₖₛAₑₛGₖ | | |

TABLE 40
Inhibition of HSD17B13 RNA by modified oligonucleotides targeting SEQ ID NO.: 1, and 2

| | SEQ | SEQ | SEQ | SEQ | | | | |
|---|---|---|---|---|---|---|---|---|
| | ID NO: | ID NO: | ID NO: | ID NO: | | | % | SEQ |
| Compound | 1 Start | 1 Stop | 2 Start | 2 Stop | Sequence | Chemistry Notation | in- | ID |
| Number | Site | Site | Site | Site | (5′ to 3′) | (5′ to 3′) | hibition | NO |
| 1245927 | N/A | N/A | 3433 | 3448 | AGTAGATGGTAAGTCA | AₖₛGₖₛTₖₛA_{ds}G_{ds}A_{ds}T_{ds}G_{ds}G_{ds} | 76 | 121 |
| | | | | | | T_{ds}A_{ds}G_{ds}Tₖₛ^{m}CₖₛAₖ | | |
| 1246023 | N/A | N/A | 5046 | 5061 | GAGTGAATCATTCAGT | GₖₛAₖₛGₖₛT_{ds}G_{ds}A_{ds}A_{ds}T_{ds}^{m}C_{ds} | 84 | 1526 |
| | | | | | | A_{ds}T_{ds}T_{ds}^{m}C_{ds}AₖₛGₖₛTₖ | | |
| 1341176 | 796 | 811 | 15677 | 15692 | CCATCTATCAGACTTC | ^{m}Cₖₛ^{m}CₖₛA_{ds}T_{ds}^{m}C_{ds}T_{ds}A_{ds}T_{ds} | 52 | 415 |
| | | | | | | ^{m}C_{ds}A_{ds}G_{ds}Aₖₛ^{m}CₑₛTₖₛTₑₛ^{m}Cₖ | | |
| 1341182 | 808 | 823 | 15689 | 15704 | TTGGTAAGTATTCCAT | TₖₛTₖₛG_{ds}G_{ds}T_{ds}A_{ds}A_{ds}G_{ds}T_{ds} | 13 | 2750 |
| | | | | | | A_{ds}T_{ds}Tₖₛ^{m}Cₑₛ^{m}CₖₛAₑₛTₖ | | |
| 1341183 | 1077 | 1092 | 20892 | 20907 | TAGTGCCAAACCAATG | TₖₛAₖₛG_{ds}T_{ds}G_{ds}^{m}C_{ds}^{m}C_{ds}A_{ds} | 66 | 1198 |
| | | | | | | A_{ds}A_{ds}^{m}C_{ds}^{m}CₖₛAₑₛAₖₛTₑₛGₖ | | |
| 1341187 | 1081 | 1096 | 20896 | 20911 | CTGCTAGTGCCAAACC | ^{m}CₖₛTₖₛG_{ds}^{m}C_{ds}T_{ds}A_{ds}G_{ds}T_{ds}G_{ds} | 51 | 1510 |
| | | | | | | ^{m}ₖCAₛ^{m}ₖCAₛAₖₛAₑₛAₖₛ^{m}Cₑₛ^{m}Cₖ | | |
| 1341191 | 1085 | 1100 | 20900 | 20915 | ACTGCTGCTAGTGCCA | Aₖₛ^{m}CₖₛT_{ds}G_{ds}^{m}C_{ds}T_{ds}G_{ds}^{m}C_{ds} | 39 | 1821 |
| | | | | | | T_{ds}A_{ds}G_{ds}TₖₛGₑₛ^{m}Cₖₛ^{m}CₑₛAₖ | | |
| 1341202 | 1259 | 1274 | 21074 | 21089 | GTAGCTTTTGTCCACC | GₖₛTₖₛA_{ds}G_{ds}^{m}C_{ds}T_{ds}T_{ds}T_{ds}T_{ds} | 34 | 1978 |
| | | | | | | G_{ds}T_{ds}^{m}Cₖₛ^{m}CₑₛAₖₛ^{m}Cₑₛ^{m}Cₖ | | |
| 1341204 | 1313 | 1328 | 21128 | 21143 | AGTCTTAAACCTTCCC | AₖₛGₖₛT_{ds}^{m}C_{ds}T_{ds}T_{ds}A_{ds}A_{ds}A_{ds} | 43 | 1979 |
| | | | | | | ^{m}C_{ds}^{m}C_{ds}TₖₛTₑₛ^{m}Cₖₛ^{m}Cₑₛ^{m}Cₖ | | |
| 1341211 | 1325 | 1340 | 21140 | 21155 | TGCTACTTGAACAGTC | TₖₛGₖₛ^{m}C_{ds}T_{ds}A_{ds}^{m}C_{ds}T_{ds}T_{ds}G_{ds} | 64 | 889 |
| | | | | | | A_{ds}A_{ds}^{m}CₖₛAₑₛGₖₛTₑₛ^{m}Cₖ | | |
| 1341214 | 1321 | 1336 | 21136 | 21151 | ACTTGAACAGTCTTAA | Aₖₛ^{m}CₖₛT_{ds}T_{ds}G_{ds}A_{ds}A_{ds}^{m}C_{ds} | 60 | 578 |
| | | | | | | A_{ds}G_{ds}T_{ds}^{m}CₖₛTₑₛTₖₛAₑₛAₖ | | |
| 1341218 | 1317 | 1332 | 21132 | 21147 | GAACAGTCTTAAACCT | GₖₛAₖₛA_{ds}^{m}C_{ds}A_{ds}G_{ds}T_{ds}^{m}C_{ds} | 63 | 266 |
| | | | | | | T_{ds}T_{ds}A_{ds}AₖₛAₑₛ^{m}Cₖₛ^{m}CₑₛTₖ | | |
| 1341222 | 1342 | 1357 | 21157 | 21172 | ATGGCTACAGATTGGA | AₖₛTₖₛG_{ds}G_{ds}^{m}C_{ds}T_{ds}A_{ds}^{m}C_{ds} | 57 | 111 |
| | | | | | | A_{ds}G_{ds}A_{ds}TₖₛTₑₛGₖₛGₑₛAₖ | | |
| 1341226 | 1329 | 1344 | 21144 | 21159 | GGAATGCTACTTGAAC | GₖₛGₖₛA_{ds}A_{ds}T_{ds}G_{ds}^{m}C_{ds}T_{ds}A_{d} | 49 | 1201 |
| | | | | | | ₛ^{m}C_{ds}T_{ds}TₖₛGₑₛAₖₛAₑₛ^{m}Cₖ | | |
| 1341227 | 1335 | 1350 | 21150 | 21165 | CAGATTGGAATGCTAC | ^{m}CₖₛAₖₛG_{ds}A_{ds}T_{ds}T_{ds}G_{ds}G_{ds}A_{d} | 57 | 1590 |
| | | | | | | ₛA_{ds}T_{ds}Gₖₛ^{m}CₑₛTₖₛAₑₛ^{m}Cₖ | | |
| 1341237 | 1353 | 1368 | 21168 | 21183 | TATTCTGTGGCATGGC | TₖₛAₖₛT_{ds}T_{ds}^{m}C_{ds}T_{ds}G_{ds}T_{ds}G_{ds} | 57 | 890 |
| | | | | | | G_{ds}^{m}C_{ds}AₖₛTₑₛGₖₛGₑₛ^{m}Cₖ | | |
| 1341242 | 1366 | 1381 | 21181 | 21196 | GTGTTCTTGTTGATAT | GₖₛTₖₛG_{ds}T_{ds}T_{ds}^{m}C_{ds}T_{ds}T_{ds}G_{ds} | 63 | 1514 |
| | | | | | | T_{ds}T_{ds}CTₖₛAₑₛTₖₛAₑTₖ | | |
| 1341248 | 1357 | 1372 | 21172 | 21187 | TTGATATTCTGTGGCA | TₖₛTₖₛG_{ds}A_{ds}T_{ds}A_{ds}T_{ds}T_{ds}^{M}C_{ds} | 55 | 1202 |
| | | | | | | T_{ds}G_{ds}TₖₛGₑₛGₖₛ^{m}CₑₛAₖ | | |
| 1341254 | 1421 | 1436 | 21236 | 21251 | AGGTTGAGATAAAGCT | AₖₛGₖₛG_{ds}T_{ds}T_{ds}G_{ds}A_{ds}G_{ds}A_{ds} | 60 | 1904 |
| | | | | | | T_{ds}A_{ds}AₖₛAₑₛGₖₛ^{m}CₑₛTₖ | | |
| 1341262 | 1490 | 1505 | 21305 | 21320 | CCGTTTTGGGCTAATG | ^{m}Cₖₛ^{m}CₖₛG_{ds}T_{ds}T_{ds}T_{ds}T_{ds}G_{ds}G | 72 | 1360 |
| | | | | | | _{ds}G_{ds}^{m}C_{ds}TₖₛAₑₛAₖₛTₑₛGₖ | | |
| 1341265 | 1494 | 1509 | 21309 | 21324 | TGCACCGTTTTGGGCT | TₖₛGₖₛ^{m}C_{ds}A_{ds}^{m}C_{ds}^{m}C_{ds}G_{ds}T_{ds} | 29 | 1671 |
| | | | | | | T_{ds}T_{ds}T_{ds}GₖₛGₑₛGₖₛ^{m}CₑₛTₖ | | |
| 1341269 | 1464 | 1479 | 21279 | 21294 | AGGCTAGGGAAATCTT | AₖₛGₖₛG_{ds}^{m}C_{ds}T_{ds}A_{ds}G_{ds}G_{ds}G_{d} | 45 | 892 |
| | | | | | | ₛA_{ds}A_{ds}AₖₛTₑₛ^{m}CₖₛTₑₛTₖ | | |
| 1341275 | 1619 | 1634 | 21434 | 21449 | GTCGGTCACCTTTCAT | GₖₛTₖₛ^{m}C_{ds}G_{ds}G_{ds}T_{ds}^{m}C_{ds}A_{ds}^{m} | 57 | 194 |
| | | | | | | C_{ds}^{m}C_{ds}T_{ds}TₖₛTₑₛ^{m}CₖₛAₑₛTₖ | | |
| 1341277 | 1598 | 1613 | 21413 | 21428 | ATCTTATAAGACTATA | AₖₛTₖₛ^{m}C_{ds}T_{ds}T_{ds}A_{ds}T_{ds}A_{ds}A_{ds} | 30 | 2661 |
| | | | | | | G_{ds}A_{ds}^{m}CₖₛTₑₛAₖₛTₑₛAₖ | | |
| 1341284 | 1627 | 1642 | 21442 | 21457 | AAAATAGAGTCGGTCA | AₖₛAₖₛA_{ds}A_{ds}T_{ds}A_{ds}G_{ds}A_{ds}G_{ds} | 53 | 817 |
| | | | | | | T_{ds}^{m}C_{ds}GₖₛGₑₛTₖₛ^{m}CₑₛAₖ | | |
| 1341286 | 1623 | 1638 | 21438 | 21453 | TAGAGTCGGTCACCTT | TₖₛAₖₛG_{ds}A_{ds}G_{ds}T_{ds}^{m}C_{ds}G_{ds}G_{ds} | 48 | 506 |
| | | | | | | T_{ds}^{m}C_{ds}Aₖₛ^{m}Cₑₛ^{m}CₖₛTₑₛTₖ | | |
| 1341291 | 1711 | 1726 | 21526 | 21541 | CATCTCTGGGACCAAG | ^{m}CₖₛAₖₛT_{ds}^{m}C_{ds}T_{ds}^{m}C_{ds}T_{ds}G_{ds} | 44 | 117 |
| | | | | | | G_{ds}G_{ds}A_{ds}^{m}Cₖₛ^{m}CₑₛAₖₛAₑₛGₖ | | |
| 1341292 | 1715 | 1730 | 21530 | 21545 | TAAACATCTCTGGGAC | TₖₛAₖₛA_{ds}A_{ds}^{m}C_{ds}A_{ds}T_{ds}^{m}C_{ds}T | 39 | 351 |
| | | | | | | _{ds}^{m}C_{ds}T_{ds}GₖₛGₑₛGₖₛAₑₛ^{m}Cₖ | | |
| 1341300 | 1719 | 1734 | 21534 | 21549 | TGTCTAAACATCTCTG | TₖₛGₖₛT_{ds}^{m}C_{ds}T_{ds}A_{ds}A_{ds}A_{ds}^{m}C | 59 | 507 |
| | | | | | | _{ds}A_{ds}T_{ds}^{m}CₖₛTₑₛ^{m}CₖₛTₑₛGₖ | | |
| 1341302 | 1770 | 1785 | 21585 | 21600 | AGCCAGTACAGTTCCT | AₖₛGₖₛ^{m}C_{ds}^{m}C_{ds}A_{ds}G_{ds}T_{ds}A_{ds}^{m} | 49 | 1909 |
| | | | | | | C_{ds}A_{ds}G_{ds}TₖₛTₑₛ^{m}Cₖₛ^{m}CₑₛTₖ | | |
| 1341307 | 1751 | 1766 | 21566 | 21581 | CCTGTGTTAGCTTTAA | ^{m}Cₖₛ^{m}CₖₛT_{ds}G_{ds}T_{ds}G_{ds}T_{ds}T_{ds}A | 62 | 1364 |
| | | | | | | _{ds}G_{ds}^{m}C_{ds}TₖₛTₑₛTₖₛAₑₛAₖ | | |
| 1341310 | 1783 | 1798 | 21598 | 21613 | TTTCTTATGTAATAGC | TₖₛTₖₛT_{ds}^{m}C_{ds}T_{ds}T_{ds}A_{ds}T_{ds}G_{ds} | 60 | 2128 |
| | | | | | | T_{ds}A_{ds}AₖₛTₑₛAₖₛGₑₛ^{m}Cₖ | | |
| 1341314 | 1779 | 1794 | 21594 | 21609 | TTATGTAATAGCCAGT | TₖₛTₖₛA_{ds}T_{ds}G_{ds}T_{ds}A_{ds}A_{ds}T_{ds} | 63 | 586 |
| | | | | | | A_{ds}G_{ds}^{m}Cₖₛ^{m}CₑₛAₖₛGₑₛTₖ | | |
| 1341316 | 1775 | 1790 | 21590 | 21605 | GTAATAGCCAGTACAG | GₖₛTₖₛA_{ds}A_{ds}T_{ds}A_{ds}G_{ds}^{m}C_{ds}^{m} | 47 | 274 |
| | | | | | | C_{ds}A_{ds}G_{ds}TₖₛAₑₛ^{m}CₖₛAₑₛGₖ | | |
| 1341329 | 2187 | 2202 | 22002 | 22017 | TGATGTAGTGGGAGTC | TₖₛGₖₛA_{ds}T_{ds}G_{ds}T_{ds}A_{ds}G_{ds}T_{ds} | 46 | 820 |
| | | | | | | G_{ds}G_{ds}GₖₛAₑₛGₖₛTₑₛ^{m}Cₖ | | |
| 1341332 | N/A | N/A | 9514 | 9529 | ACTAATATTGAGGCAC | Aₖₛ^{m}CₖₛT_{ds}A_{ds}A_{ds}T_{ds}A_{ds}T_{ds}T_{ds} | 27 | 1772 |
| | | | | | | G_{ds}A_{ds}GₖₛGₑₛ^{m}CₖₛAₑₛ^{m}Cₖ | | |
| 1341334 | 2250 | 2265 | 22065 | 22080 | AGGATAGTCCATGCAA | AₖₛGₖₛG_{ds}A_{ds}T_{ds}A_{ds}G_{ds}T_{ds}^{m}C_{d} | 46 | 2690 |
| | | | | | | ₛ^{m}C_{ds}A_{ds}TₖₛGₑₛ^{m}CₖₛAₑₛAₖ | | |
| 1341337 | N/A | N/A | 9332 | 9347 | ATCCTATATACATCCA | AₖₛTₖₛ^{m}C_{ds}^{m}C_{ds}T_{ds}A_{ds}T_{ds}A_{ds}T | 65 | 1927 |
| | | | | | | _{ds}A_{ds}^{m}C_{ds}AₖₛTₑₛ^{m}Cₖₛ^{m}CₑₛAₖ | | |
| 1341342 | N/A | N/A | 9966 | 9981 | TAGTGTAAGCTGAGAG | TₖₛAₖₛG_{ds}T_{ds}G_{ds}T_{ds}A_{ds}A_{ds}G_{ds} | 68 | 1852 |
| | | | | | | ^{m}C_{ds}T_{ds}GₖₛAₑₛGₖₛAₑₛGₖ | | |
| 1341346 | N/A | N/A | 9601 | 9616 | CATATGTGAAGAGCTG | ^{m}CₖₛAₖₛT_{ds}A_{ds}T_{ds}G_{ds}T_{ds}G_{ds}A_{d} | 35 | 683 |
| | | | | | | ₛA_{ds}G_{ds}AₖₛGₑₛ^{m}CₖₛTₑₛGₖ | | |
| 1341348 | N/A | N/A | 11548 | 11563 | TCTCTTGACAATGGTT | Tₖₛ^{m}CₖₛT_{ds}^{m}C_{ds}T_{ds}T_{ds}G_{ds}A_{ds}^{m} | 70 | 1389 |
| | | | 11573 | 11588 | | C_{ds}A_{ds}A_{ds}TₖₛGₑₛGₖₛTₑₛTₖ | 100 | |
| 1341350 | N/A | N/A | 14916 | 14931 | ATACATTAGCAAGCTA | AₖₛTₖₛA_{ds}^{m}C_{ds}A_{ds}T_{ds}T_{ds}A_{ds}G_{d} | 22 | 309 |
| | | | | | | ₛ^{m}C_{ds}A_{ds}AₖₛGₑₛ^{m}CₖₛTₑₛAₖ | | |
| 1341358 | N/A | N/A | 14197 | 14212 | TTATGTGATTGAGTTC | TₖₛTₖₛA_{ds}T_{ds}G_{ds}T_{ds}G_{ds}A_{ds}T_{ds}T | 21 | 2431 |
| | | | | | | _{ds}G_{ds}AₖₛGₑₛTₖₛTₑₛ^{m}Cₖ | | |
| 1341363 | N/A | N/A | 15496 | 15511 | CTGCATTAATGCCACC | ^{m}CₖₛTₖₛG_{ds}^{m}C_{ds}A_{ds}T_{ds}T_{ds}A_{ds}A | 6 | 1168 |
| | | | | | | _{ds}T_{ds}G_{ds}^{m}Cₖₛ^{m}CₑₛAₖₛ^{m}Cₑₛ^{m}Cₖ | | |
| 1341364 | N/A | N/A | 16127 | 16142 | CATAATAATAGCTCTA | ^{m}CₖₛAₖₛT_{ds}A_{ds}A_{ds}T_{ds}A_{ds}A_{ds}T_{ds} | 13 | 2511 |
| | | | | | | A_{ds}G_{ds}^{m}CₖₛTₑₛTₖₛ^{m}CₑₛAₖ | | |
| 1341365 | N/A | N/A | 16289 | 16304 | GTTAGAATAGTCTTCA | GₖₛTₖₛT_{ds}A_{ds}G_{ds}A_{ds}A_{ds}T_{ds}A_{ds} | 45 | 1481 |
| | | | | | | G_{ds}T_{ds}^{m}CₖₛTₑₛTₖₛ^{m}CₑₛAₖ | | |
| 1341370 | N/A | N/A | 16382 | 16397 | TCCCAACCAAACTTCC | Tₖₛ^{m}Cₖₛ^{m}C_{ds}^{m}C_{ds}A_{ds}A_{ds}^{m}C_{ds}^{m} | 27 | 2026 |
| | | | | | | C_{ds}A_{ds}A_{ds}A_{ds}^{m}CₖₛTₑₛTₖₛ^{m}Cₑₛ^{m} | | |
| | | | | | | Cₖ | | |
| 1341371 | N/A | N/A | 18095 | 18110 | AATTGATACACCAATG | AₖₛAₖₛT_{ds}TaₛG_{ds}A_{ds}T_{ds}A_{ds}^{m}C_{ds} | 50 | 2525 |
| | | | | | | A_{ds}^{m}C_{ds}^{m}CₖₛAₑₛAₖₛTₑₛGₖ | | |
| 1341376 | N/A | N/A | 17994 | 18009 | GAAGTTAGTATAGTTA | GₖₛAₖₛA_{ds}G_{ds}T_{ds}T_{ds}A_{ds}G_{ds}T_{ds} | 56 | 1327 |
| | | | | | | A_{ds}T_{ds}AₖₛGₑₛTₖₛTₑₛAₖ | | |
| 1341379 | N/A | N/A | 17989 | 18004 | TAGTATAGTTATCTTC | TₖₛAₖₛG_{ds}T_{ds}A_{ds}T_{ds}A_{ds}G_{ds}T_{ds} | 34 | 1093 |
| | | | | | | T_{ds}A_{ds}Tₖₛ^{m}CₑₛTₖₛTₑₛ^{m}Cₖ | | |
| 1341380 | N/A | N/A | 19909 | 19924 | ATCTTAAGATACCCAG | AₖₛTₖₛ^{m}C_{ds}T_{ds}T_{ds}A_{ds}A_{ds}G_{ds}A_{d} | 45 | 397 |
| | | | | | | ₛT_{ds}A_{ds}^{m}Cₖₛ^{m}Cₑₛ^{m}CₖₛAₑₛGₖ | | |
| 1341384 | N/A | N/A | 19913 | 19928 | GTGCATCTTAAGATAC | GₖₛTₖₛG_{ds}^{m}C_{ds}A_{ds}T_{ds}^{m}C_{ds}T_{ds}T | 20 | 2806 |
| | | | | | | _{ds}A_{ds}A_{ds}GₖₛAₑₛTₖₛAₑₛ^{m}Cₖ | | |
| 1341388 | N/A | N/A | 18695 | 18710 | AAAGACTTTGAGACTC | AₖₛAₖₛA_{ds}G_{ds}A_{ds}^{m}C_{ds}T_{ds}T_{ds}T_{d} | 45 | 1250 |
| | | | | | | ₛG_{ds}A_{ds}GₖₛAₑₛ^{m}CₖₛTₑₛ^{m}Cₖ | | |
| 1341391 | N/A | N/A | 20383 | 20398 | GTAATCACAAGTAAGG | GₖₛTₖₛA_{ds}A_{ds}T_{ds}^{m}C_{ds}A_{ds}^{m}C_{ds} | 72 | 1411 |
| | | | | | | A_{ds}A_{ds}G_{ds}TₖₛAₑₛAₖₛGₑₛGₖ | | |
| 1341399 | N/A | N/A | 20190 | 20205 | AGTTATTAGAAGTCAG | AₖₛGₖₛT_{ds}T_{ds}A_{ds}T_{ds}T_{ds}A_{ds}G_{ds} | 42 | 2746 |
| | | | | | | A_{ds}A_{ds}GₖₛTₑₛ^{m}CₖₛAₑₛGₖ | | |
| 1341401 | N/A | N/A | 20484 | 20499 | CTTCATAGTGGACTTC | ^{m}CₖₛTₖₛT_{ds}^{m}C_{ds}A_{ds}T_{ds}A_{ds}G_{ds}T | 45 | 711 |
| | | | | | | _{ds}G_{ds}G_{ds}Aₖₛ^{m}CₑₛTₖₛTₑₛ^{m}Cₖ | | |
| 1341410 | N/A | N/A | 13954 | 13969 | CCTCTAAGTTAGCCCC | ^{m}Cₖₛ^{m}CₖₛT_{ds}^{m}C_{ds}T_{ds}A_{ds}A_{ds}G_{ds} | 20 | 1084 |
| | | | | | | T_{ds}T_{ds}A_{ds}Gₖₛ^{m}Cₑₛ^{m}Cₖₛ^{m}Cₑₛ^{m}Cₖ | | |
| 1341418 | N/A | N/A | 12797 | 12812 | TGTAAGAGTCAGTATC | TₖₛGₖₛT_{ds}A_{ds}A_{ds}G_{ds}A_{ds}G_{ds}T_{ds} | 35 | 2652 |
| | | | | | | ^{m}C_{ds}A_{ds}GₖₛTₑₛAₖₛTₑₛ^{m}Cₖ | | |
| 1341419 | N/A | N/A | 14172 | 14187 | TTGAATAGCAAGCCAA | TₖₛTₖₛG_{ds}A_{ds}A_{ds}T_{ds}A_{ds}G_{ds}^{m}C_{ds} | 27 | 1864 |
| | | | | | | A_{ds}A_{ds}Gₖₛ^{m}Cₑₛ^{m}CₖₛAₑₛAₖ | | |
| 1341529 | 693 | 708 | 12111 | 12126 | ATGAGGTTTTGATACC | AₖₛTₖₛG_{ds}A_{ds}G_{ds}G_{ds}T_{ds}T_{ds}T_{ds} | 51 | 569 |
| | | | | | | T_{ds}G_{ds}AₖₛTₑₛAₖₛ^{m}Cₑₛ^{m}Cₖ | | |
| 1341533 | 1022 | 1037 | 20837 | 20852 | CTTTGCAGCATTGATT | ^{m}CₖₛTₖₛT_{ds}T_{ds}G_{ds}^{m}C_{ds}A_{ds}G_{ds}^{m} | 49 | 2463 |
| | | | | | | C_{ds}A_{ds}T_{ds}TₖₛGₑₛAₖₛTₑₛTₖ | | |
| 1341540 | 1309 | 1324 | 21124 | 21139 | TTAAACCTTCCCTGTG | TₖₛTₖₛA_{ds}A_{ds}A_{ds}^{m}C_{ds}^{m}C_{ds}T_{ds}T_{ds} | 0 | 2807 |
| | | | | | | ^{m}C_{ds}^{m}C_{ds}^{m}CₖₛTₑₛGₖₛTₑₛGₖ | | |
| 1341545 | 1175 | 1190 | 20990 | 21005 | TAAGAGGCATGAAAGG | TₖₛAₖₛA_{ds}G_{ds}A_{ds}G_{ds}G_{ds}^{m}C_{ds}A_{d} | 54 | 2751 |
| | | | | | | ₛT_{ds}G_{ds}AₖₛAₑₛAₖₛGₑₛGₖ | | |
| 1341546 | 1251 | 1266 | 21066 | 21081 | TGTCCACCTTTAAATG | TₖₛGₖₛT_{ds}^{m}C_{ds}^{m}C_{ds}A_{ds}^{m}C_{ds}^{m}C_{d} | 27 | 1666 |
| | | | | | | ₛT_{ds}T_{ds}T_{ds}AₖₛAₑₛAₖₛTₑₛGₖ | | |
| 1341552 | 1348 | 1363 | 21163 | 21178 | TGTGGCATGGCTACAG | TₖₛGₖₛT_{ds}G_{ds}G_{ds}^{m}C_{ds}A_{ds}T_{ds}G_{d} | 22 | 579 |
| | | | | | | ₛG_{ds}^{m}C_{ds}TₖₛAₑₛ^{m}CₖₛAₑₛGₖ | | |
| 1341554 | 1394 | 1409 | 21209 | 21224 | CTTGATCTCTTAGCTG | ^{m}CₖₛTₖₛT_{ds}G_{ds}A_{ds}T_{ds}^{m}C_{ds}T_{ds}^{m} | 49 | 736 |
| | | | | | | C_{ds}T_{ds}T_{ds}AₖₛGₑₛ^{m}CₖₛTₑₛGₖ | | |
| 1341558 | 1388 | 1403 | 21203 | 21218 | CTCTTAGCTGTGCACT | ^{m}CₖₛTₖₛ^{m}C_{ds}T_{ds}T_{ds}A_{ds}G_{ds}^{m}C_{ds} | 56 | 268 |
| | | | | | | T_{ds}G_{ds}T_{ds}Gₖₛ^{m}CₑₛAₖₛ^{m}CₑₛTₖ | | |
| 1341560 | 1498 | 1513 | 21313 | 21328 | GAGTTGCACCGTTTTG | GₖₛAₖₛG_{ds}T_{ds}T_{ds}G_{ds}^{m}C_{ds}A_{ds}^{m} | 61 | 1983 |
| | | | | | | C_{ds}^{m}C_{ds}G_{ds}TₖₛTₑₛTₖₛTₑₛGₖ | | |
| 1341563 | 1416 | 1431 | 21231 | 21246 | GAGATAAAGCTGCCTG | GₖₛAₖₛG_{ds}A_{ds}T_{ds}A_{ds}A_{ds}A_{ds}G_{ds}^{m} | 40 | 1592 |
| | | | | | | C_{ds}T_{ds}Gₖₛ^{m}Cₑₛ^{m}CₖₛTₑₛGₖ | | |
| 1341566 | 1426 | 1441 | 21241 | 21256 | TGTCCAGGTTGAGATA | TₖₛGₖₛT_{ds}^{m}C_{ds}^{m}C_{ds}A_{ds}G_{ds}G_{ds}T | 48 | 191 |
| | | | | | | _{ds}T_{ds}G_{ds}AₖₛGₑₛAₖₛTₑₛAₖ | | |
| 1341574 | 1615 | 1630 | 21430 | 21445 | GTCACCTTTCATAATG | GₖₛTₖₛ^{m}C_{ds}A_{ds}^{m}C_{ds}^{m}C_{ds}T_{ds}T_{ds} | 4 | 1907 |
| | | | | | | T_{ds}^{m}C_{ds}A_{ds}TₖₛAₑₛAₖₛTₑₛGₖ | | |
| 1341577 | 1705 | 1720 | 21520 | 21535 | TGGGACCAAGGATATA | TₖₛGₖₛG_{ds}G_{ds}A_{ds}^{m}C_{ds}^{m}C_{ds}A_{ds} | 30 | 1674 |
| | | | | | | A_{ds}G_{ds}G_{ds}AₖₛTₑₛAₖₛTₑₛAₖ | | |
| 1341583 | 2194 | 2209 | 22009 | 22024 | TTAGTCTTGATGTAGT | TₖₛTₖₛA_{ds}G_{ds}T_{ds}^{m}C_{ds}T_{ds}T_{ds}G_{ds} | 36 | 1366 |
| | | | | | | A_{ds}T_{ds}GₖₛTₑₛAₖₛGₑₛTₖ | | |
| 1341589 | N/A | N/A | 11858 | 11873 | GATTAAGCAGAATTGT | GₖₛAₖₛT_{ds}T_{ds}A_{ds}A_{ds}G_{ds}^{m}C_{ds}A_{d} | 31 | 1156 |
| | | | | | | ₛG_{ds}A_{ds}AₖₛTₑₛTₖₛGₑₛTₖ | | |
| 1341591 | N/A | N/A | 11543 | 11558 | TGACAATGGTTGCCAC | TₖₛGₖₛA_{ds}^{m}C_{ds}A_{ds}A_{ds}T_{ds}G_{ds}G_{ds} | 38 | 1233 |
| | | | | | | T_{ds}T_{ds}Gₖₛ^{m}Cₑₛ^{m}CₖₛAₑₛ^{m}Cₖ | | |
| 1341595 | 2350 | 2365 | 22165 | 22180 | ACTACAAGAGGTTATT | Aₖₛ^{m}CₖₛT_{ds}A_{ds}^{m}C_{ds}A_{ds}A_{ds}G_{ds} | 42 | 899 |
| | | | | | | A_{ds}G_{ds}G_{ds}TₖₛTₑₛAₖₛTₑₛTₖ | | |
| 1341600 | N/A | N/A | 12416 | 12431 | ACGGTGATCAAATGTA | Aₖₛ^{m}CₖₛG_{ds}G_{ds}T_{ds}G_{ds}A_{ds}T_{ds}^{m} | 33 | 2205 |
| | | | | | | C_{ds}A_{ds}A_{ds}AₖₛTₑₛGₖₛTₑₛAₖ | | |
| 1341601 | N/A | N/A | 16218 | 16233 | TATAGACTGGGTAGGA | TₖₛAₖₛT_{ds}A_{ds}G_{ds}A_{ds}^{m}C_{ds}T_{ds}G_{d} | 38 | 2808 |
| | | | | | | ₛG_{ds}G_{ds}TₖₛAₑₛGₖₛGₑₛAₖ | | |
| 1341607 | N/A | N/A | 12426 | 12441 | CAGGGTGGTAACGGTG | ^{m}CₖₛAₖₛG_{ds}G_{ds}G_{ds}T_{ds}G_{ds}G_{ds}T_{d} | 49 | 2729 |
| | | | | | | ₛA_{ds}A_{ds}^{m}CₖₛGₑₛGₖₛTₑₛGₖ | | |

TABLE 41
Inhibition of HSD17B13 RNA by modified oligonucleotides targeting SEQ ID NO.: 1, and 2

| | SEQ | SEQ | SEQ | SEQ | | | | |
|---|---|---|---|---|---|---|---|---|
| | ID NO: | ID NO: | ID NO: | ID NO: | | | % | SEQ |
| Compound | 1 Start | 1 Stop | 2 Start | 2 Stop | Sequence | Chemistry Notation | in- | ID |
| Number | Site | Site | Site | Site | (5′ to 3′) | (5′ to 3′) | hibition | NO |
| 1245927 | N/A | N/A | 3433 | 3448 | AGTAGATGGTAAGTCA | AₖₛGₖₛTₖₛA_{ds}G_{ds}A_{ds}T_{ds}G_{ds}G_{ds}T_{d} | 93 | 121 |
| | | | | | | ₛA_{ds}A_{ds}G_{ds}Tₖₛ^{m}CₖₛAₖ | | |
| 1246023 | N/A | N/A | 5046 | 5061 | GAGTGAATCATTCAGT | GₖₛAₖₛGₖₛT_{ds}G_{ds}A_{ds}A_{ds}T_{ds}^{m}C_{ds} | 88 | 1526 |
| | | | | | | A_{ds}T_{ds}T_{ds}^{m}C_{ds}AₖₛGₖₛTₖ | | |
| 1341165 | 608 | 623 | N/A | N/A | ACAATATGGGATGAGG | Aₖₛ^{m}CₖₛA_{ds}A_{ds}T_{ds}A_{ds}T_{ds}G_{ds}G_{ds} | 51 | 1579 |
| | | | | | | G_{ds}A_{ds}TₖₛGₑₛAₖₛGₑₛGₖ | | |
| 1341170 | 810 | 825 | 15691 | 15706 | TATTGGTAAGTATTCC | TₖₛAₖₛT_{ds}T_{ds}G_{ds}G_{ds}T_{ds}A_{ds}A_{ds}G_{d} | 36 | 1272 |
| | | | | | | ₛT_{ds}AₖₛTₑₛTₖₛ^{m}Cₑₛ^{m}Cₖ | | |
| 1341174 | 798 | 813 | 15679 | 15694 | TTCCATCTATCAGACT | TₖₛTₖₛ^{m}C_{ds}^{m}C_{ds}A_{ds}T_{ds}^{m}C_{ds}T_{ds}A_{d} | 33 | 571 |
| | | | | | | ₛT_{ds}^{m}C_{ds}AₖₛGₑₛAₖₛ^{m}CₑₛTₖ | | |
| 1341177 | 696 | 711 | 12114 | 12129 | GACATGAGGTTTTGAT | GₖₛAₖₛ^{m}C_{ds}A_{ds}T_{ds}G_{ds}A_{ds}G_{ds}G_{ds} | 55 | 647 |
| | | | | | | T_{ds}T_{ds}TₖₛTₑₛGₖₛAₑₛTₖ | | |
| 1341181 | 1078 | 1093 | 20893 | 20908 | CTAGTGCCAAACCAAT | ^{m}CₖₛTₖₛA_{ds}G_{ds}T_{ds}G_{ds}^{m}C_{ds}^{m}C_{ds}A | 47 | 1276 |
| | | | | | | _{ds}A_{ds}A_{ds}^{m}Cₖₛ^{m}CₑₛAₖₛAₑₛTₖ | | |
| 1341185 | 1082 | 1097 | 20897 | 20912 | GCTGCTAGTGCCAAAC | Gₖₛ^{m}CₖₛT_{ds}G_{ds}^{m}C_{ds}T_{ds}A_{ds}G_{ds}T_{ds} | 62 | 1587 |
| | | | | | | G_{ds}^{m}C_{ds}^{m}C_{kS}A_{eS}A_{kS}Aₑₛ^{m}Cₖ | | |
| 1341195 | 1180 | 1195 | 20995 | 21010 | GTTTTTAAGAGGCATG | GₖₛTₖₛT_{ds}T_{ds}T_{ds}T_{ds}A_{ds}A_{ds}G_{ds}A_{ds} | 79 | 1199 |
| | | | | | | G_{ds}Grₖₛ^{m}CₑₛAₖₛTₑₛGₖ | | |
| 1341197 | 1086 | 1101 | 20901 | 20916 | GACTGCTGCTAGTGCC | GₖₛAₖₛ^{m}C_{ds}T_{ds}G_{ds}^{m}C_{ds}T_{ds}G_{ds}^{m}C | 35 | 1899 |
| | | | | | | _{ds}T_{ds}A_{ds}GₖₛTₑₛGₖₛ^{m}Cₑₛ^{m}Cₖ | | |
| 1341201 | 1314 | 1329 | 21129 | 21144 | CAGTCTTAAACCTTCC | ^{m}CₖₛAₖₛG_{ds}T_{ds}^{m}C_{ds}T_{ds}T_{ds}A_{ds}A_{ds} | 51 | 30 |
| | | | | | | A_{ds}^{m}C_{ds}^{m}CₖₛTₑₛTₖₛ^{m}Cₑₛ^{m}Cₖ | | |
| 1341206 | 1256 | 1271 | 21071 | 21086 | GCTTTTGTCCACCTTT | Gₖₛ^{m}CₖₛT_{ds}T_{ds}T_{ds}T_{ds}G_{ds}T_{ds}^{m}C_{ds} | 75 | 1744 |
| | | | | | | ^{m}C_{ds}A_{ds}^{m}Cₖₛ^{m}CₑₛTₖₛTₑₛTₖ | | |
| 1341207 | 1261 | 1276 | 21076 | 21091 | AGGTAGCTTTTGTCCA | AₖₛGₖₛG_{ds}T_{ds}A_{ds}G_{ds}^{m}C_{ds}T_{ds}T_{ds}T | 26 | 109 |
| | | | | | | _{ds}T_{ds}GₖₛTₑₛ^{m}Cₖₛ^{m}CₑₛAₖ | | |
| 1341210 | 1326 | 1341 | 21141 | 21156 | ATGCTACTTGAACAGT | AₖₛTₖₛG_{ds}^{m}C_{ds}T_{ds}A_{ds}^{m}C_{ds}T_{ds}T_{ds} | 54 | 967 |
| | | | | | | G_{ds}A_{ds}Aₖₛ^{m}CₑₛAₖₛGₑₛTₖ | | |
| 1341212 | 1322 | 1337 | 21137 | 21152 | TACTTGAACAGTCTTA | TₖₛAₖₛ^{m}C_{ds}T_{ds}T_{ds}G_{ds}A_{ds}A_{ds}^{m}C_{ds} | 60 | 656 |
| | | | | | | A_{ds}G_{ds}Tₖₛ^{m}CₑₛTₖₛTₑₛAₖ | | |
| 1341219 | 1318 | 1333 | 21133 | 21148 | TGAACAGTCTTAAACC | TₖₛGₖₛA_{ds}A_{ds}^{m}C_{ds}A_{ds}G_{ds}T_{ds}^{m}C_{ds} | 34 | 344 |
| | | | | | | T_{ds}T_{ds}AₖₛAₑₛAₖₛ^{m}Cₑₛ^{m}Cₖ | | |
| 1341225 | 1344 | 1359 | 21159 | 21174 | GCATGGCTACAGATTG | Gₖₛ^{m}CₖₛA_{ds}T_{ds}G_{ds}G_{ds}^{m}C_{ds}T_{ds}A_{ds} | 41 | 267 |
| | | | | | | ^{m}C_{ds}A_{ds}GₖₛAₑₛTₖₛTₑₛGₖ | | |
| 1341231 | 1354 | 1369 | 21169 | 21184 | ATATTCTGTGGCATGG | AₖₛTₖₛA_{ds}T_{ds}T_{ds}^{m}C_{ds}T_{ds}G_{ds}T_{ds}G | 43 | 968 |
| | | | | | | _{ds}G_{ds}^{m}CₖₛAₑₛTₖₛGₑₛGₖ | | |
| 1341233 | 1358 | 1373 | 21173 | 21188 | GTTGATATTCTGTGGC | GₖₛTₖₛT_{ds}G_{ds}A_{ds}T_{ds}A_{ds}T_{ds}T_{ds}^{m}C | 69 | 1280 |
| | | | | | | _{ds}T_{ds}GₖₛTₑₛGₖₛGₑₛ^{m}Cₖ | | |
| 1341238 | 1349 | 1364 | 21164 | 21179 | CTGTGGCATGGCTACA | ^{m}CₖₛTₖₛG_{ds}T_{ds}G_{ds}G_{ds}^{m}C_{ds}A_{ds}T_{ds} | 33 | 657 |
| | | | | | | G_{ds}G_{ds}^{m}CₖₛTₑₛAₖₛ^{m}CₑₛAₖ | | |
| 1341240 | 1395 | 1410 | 21210 | 21225 | ACTTGATCTCTTAGCT | Aₖₛ^{m}CₖₛT_{ds}T_{ds}G_{ds}A_{ds}T_{ds}^{m}C_{ds}T_{ds} | 62 | 813 |
| | | | | | | ^{m}C_{ds}T_{ds}TₖₛAₑₛGₖₛ^{m}CₑₛTₖ | | |
| 1341243 | 1389 | 1404 | 21204 | 21219 | TCTCTTAGCTGTGCAC | Tₖₛ^{m}CₖₛT_{ds}^{m}C_{ds}T_{ds}T_{ds}A_{ds}G_{ds}^{m}C_{d} | 36 | 346 |
| | | | | | | ₛT_{ds}G_{ds}TₖₛGₑₛ^{m}CₖₛAₑₛ^{m}Cₖ | | |
| 1341246 | 1367 | 1382 | 21182 | 21197 | TGTGTTCTTGTTGATA | TₖₛGₖₛT_{ds}G_{ds}T_{ds}T_{ds}^{m}C_{ds}T_{ds}T_{ds}G | 64 | 1591 |
| | | | | | | _{ds}T_{ds}TₖₛGₑₛAₖₛTₑₛAₖ | | |
| 1341251 | 1429 | 1444 | 21244 | 21259 | ATATGTCCAGGTTGAG | AₖₛTₖₛA_{ds}T_{ds}G_{ds}T_{ds}^{m}C_{ds}^{m}C_{ds}A_{ds} | 28 | 425 |
| | | | | | | G_{ds}G_{ds}TₖₛTₑₛGₖₛAₑₛGₖ | | |
| 1341257 | 1418 | 1433 | 21233 | 21248 | TTGAGATAAAGCTGCC | TₖₛTₖₛG_{ds}A_{ds}G_{ds}A_{ds}T_{ds}A_{ds}A_{ds}A_{d} | 2 | 1670 |
| | | | | | | ₛG_{ds}^{m}CₖₛTₑₛGₖₛ^{m}Cₑₛ^{m}Cₖ | | |
| 1341259 | 1422 | 1437 | 21237 | 21252 | CAGGTTGAGATAAAGC | ^{m}CₖₛAₖₛG_{ds}G_{ds}T_{ds}T_{ds}G_{ds}A_{ds}G_{ds} | 53 | 1982 |
| | | | | | | A_{ds}T_{ds}AₖₛAₑₛAₖₛGₑₛ^{m}Cₖ | | |
| 1341260 | 1491 | 1506 | 21306 | 21321 | ACCGTTTTGGGCTAAT | Aₖₛ^{m}Cₖₛ^{m}C_{ds}G_{ds}T_{ds}T_{ds}T_{ds}T_{ds}G_{ds} | 76 | 1438 |
| | | | | | | G_{ds}G_{ds}^{m}CₖₛTₑₛAₖₛAₑₛTₖ | | |
| 1341261 | 1495 | 1510 | 21310 | 21325 | TTGCACCGTTTTGGGC | TₖₛTₖₛG_{ds}^{m}C_{ds}A_{ds}^{m}C_{ds}^{m}C_{ds}G_{ds}T_{d} | 26 | 1749 |
| | | | | | | ₛT_{ds}T_{ds}TₖₛGₑₛGₖₛGₑₛ^{m}Cₖ | | |
| 1341268 | 1466 | 1481 | 21281 | 21296 | AGAGGCTAGGGAAATC | AₖₛGₖₛA_{ds}G_{ds}G_{ds}^{m}C_{ds}T_{ds}A_{ds}G_{ds} | 59 | 1048 |
| | | | | | | G_{ds}G_{ds}AₖₛAₑₛAₖₛTₑₛ^{m}Cₖ | | |
| 1341273 | 1499 | 1514 | 21314 | 21329 | AGAGTTGCACCGTTTT | AₖₛGₖₛA_{ds}G_{ds}T_{ds}T_{ds}G_{ds}^{m}C_{ds}A_{ds}^{m} | 80 | 34 |
| | | | | | | C_{ds}^{m}C_{ds}GₖₛTₑₛTₖₛTₑₛTₖ | | |
| 1341279 | 1600 | 1615 | 21415 | 21430 | GTATCTTATAAGACTA | GₖₛTₖₛA_{ds}T_{ds}^{m}C_{ds}T_{ds}T_{ds}A_{ds}T_{ds}A | 61 | 1595 |
| | | | | | | _{ds}A_{ds}GₖₛAₑₛ^{m}CₖₛTₑₛAₖ | | |
| 1341285 | 1624 | 1639 | 21439 | 21454 | ATAGAGTCGGTCACCT | AₖₛTₖₛA_{ds}G_{ds}A_{ds}G_{ds}T_{ds}^{m}C_{ds}G_{ds} | 56 | 584 |
| | | | | | | G_{ds}T_{ds}^{m}CₖₛAₑₛ^{m}Cₖₛ^{m}CₑₛTₖ | | |
| 1341288 | 1620 | 1635 | 21435 | 21450 | AGTCGGTCACCTTTCA | AₖₛGₖₛT_{ds}^{m}C_{ds}G_{ds}G_{ds}T_{ds}^{m}C_{ds}A_{ds} | 55 | 272 |
| | | | | | | ^{m}C_{ds}^{m}C_{ds}TₖₛTₑₛTₖₛ^{m}CₑₛAₖ | | |
| 1341298 | 1712 | 1727 | 21527 | 21542 | ACATCTCTGGGACCAA | Aₖₛ^{m}CₖₛA_{ds}T_{ds}^{m}C_{ds}T_{ds}^{m}C_{ds}T_{ds}G_{d} | 67 | 195 |
| | | | | | | ₛG_{ds}G_{ds}Aₖₛ^{m}Cₑₛ^{m}CₖₛAₑₛAₖ | | |
| 1341299 | 1628 | 1643 | 21443 | 21458 | TAAAATAGAGTCGGTC | TₖₛAₖₛA_{ds}A_{ds}A_{ds}T_{ds}A_{ds}G_{ds}A_{ds}G | 68 | 895 |
| | | | | | | _{ds}T_{ds}^{m}CₖₛGₑₛGₖₛTₑₛ^{m}Cₖ | | |
| 1341306 | 1721 | 1736 | 21536 | 21551 | ATTGTCTAAACATCTC | AₖₛTₖₛT_{ds}G_{ds}T_{ds}^{m}C_{ds}T_{ds}A_{ds}A_{ds}A | 62 | 585 |
| | | | | | | _{ds}^{m}C_{ds}AₖₛTₑₛ^{m}CₖₛTₑₛ^{m}Cₖ | | |
| 1341308 | 1752 | 1767 | 21567 | 21582 | TCCTGTGTTAGCTTTA | Tₖₛ^{m}Cₖₛ^{m}C_{ds}T_{ds}G_{ds}T_{ds}G_{ds}T_{ds}T_{ds} | 79 | 1442 |
| | | | | | | A_{ds}G_{ds}^{m}CₖₛTₑₛTₖₛTₑₛAₖ | | |
| 1341312 | 1784 | 1799 | 21599 | 21614 | GTTTCTTATGTAATAG | GₖₛTₖₛT_{ds}T_{ds}^{m}C_{ds}T_{ds}T_{ds}A_{ds}T_{ds}G | 21 | 897 |
| | | | | | | _{ds}T_{ds}AₖₛAₑₛTₖₛAₑₛGₖ | | |
| 1341317 | 1780 | 1795 | 21595 | 21610 | CTTATGTAATAGCCAG | ^{m}CₖₛTₖₛT_{ds}A_{ds}T_{ds}G_{ds}T_{ds}A_{ds}A_{ds}T | 61 | 664 |
| | | | | | | _{ds}A_{ds}Gₖₛ^{m}Cₑₛ^{m}CₖₛAₑₛGₖ | | |
| 1341320 | 2189 | 2204 | 22004 | 22019 | CTTGATGTAGTGGGAG | ^{m}CₖₛTₖₛT_{ds}G_{ds}A_{ds}T_{ds}G_{ds}T_{ds}A_{ds}G | 20 | 976 |
| | | | | | | _{ds}T_{ds}GₖₛGₑₛGₖₛAₑₛGₖ | | |
| 1341324 | 2252 | 2267 | 22067 | 22082 | AGAGGATAGTCCATGC | AₖₛGₖₛA_{ds}G_{ds}G_{ds}A_{ds}T_{ds}A_{ds}G_{ds}T | 70 | 354 |
| | | | | | | _{ds}^{m}C_{ds}^{m}CₖₛAₑₛTₖₛGₑₛ^{m}Cₖ | | |
| 1341330 | N/A | N/A | 9334 | 9349 | CGATCCTATATACATC | ^{m}CₖₛGₖₛA_{ds}T_{ds}^{m}C_{ds}^{m}C_{ds}T_{ds}A_{ds}T_{d} | 29 | 2788 |
| | | | | | | ₛA_{ds}T_{ds}Aₖₛ^{m}CₑₛAₖₛTₑₛ^{m}Cₖ | | |
| 1341331 | N/A | N/A | 9516 | 9531 | ACACTAATATTGAGGC | Aₖₛ^{m}CₖₛA_{ds}^{m}C_{ds}T_{ds}A_{ds}A_{ds}T_{ds}A_{ds} | 55 | 1928 |
| | | | | | | T_{ds}T_{ds}GₖₛAₑₛGₖₛGₑₛ^{m}Cₖ | | |
| 1341336 | 2353 | 2368 | 22168 | 22183 | ATAACTACAAGAGGTT | AₖₛTₖₛA_{ds}A_{ds}^{m}C_{ds}T_{ds}A_{ds}^{m}C_{ds}A_{ds} | 46 | 1133 |
| | | | | | | A_{ds}G_{ds}AₖₛGₑₛGₖₛTₑₛTₖ | | |
| 1341340 | N/A | N/A | 11546 | 11561 | TCTTGACAATGGTTGC | Tₖₛ^{m}CₖₛT_{ds}T_{ds}G_{ds}A_{ds}^{m}C_{ds}A_{ds}A_{ds} | 37 | 2199 |
| | | | | | | T_{ds}G_{ds}GₖₛTₑₛTₖₛGₑₛ^{m}Cₖ | | |
| 1341341 | N/A | N/A | 9968 | 9983 | AGTAGTGTAAGCTGAG | AₖₛGₖₛT_{ds}A_{ds}G_{ds}T_{ds}G_{ds}T_{ds}A_{ds}A_{d} | 52 | 2155 |
| | | | | | | ₛG_{ds}^{m}CₖₛTₑₛGₖₛAₑₛGₖ | | |
| 1341349 | N/A | N/A | 9603 | 9618 | CACATATGTGAAGAGC | ^{m}CₖₛAₖₛ^{m}C_{ds}A_{ds}T_{ds}A_{ds}T_{ds}G_{ds}T_{ds} | 53 | 760 |
| | | | | | | G_{ds}A_{ds}AₖₛGₑₛAₖₛGₑₛ^{m}Cₖ | | |
| 1341352 | N/A | N/A | 15498 | 15513 | TGCTGCATTAATGCCA | TₖₛGₖₛ^{m}C_{ds}T_{ds}G_{ds}^{m}C_{ds}A_{ds}T_{ds}T_{ds} | 30 | 2485 |
| | | | | | | A_{ds}A_{ds}TₖₛGₑₛ^{m}Cₖₛ^{m}CₑₛAₖ | | |
| 1341355 | N/A | N/A | 14918 | 14933 | TAATACATTAGCAAGC | TₖₛAₖₛA_{ds}T_{ds}A_{ds}^{m}C_{ds}A_{ds}T_{ds}T_{ds}A | 34 | 2266 |
| | | | | | | _{ds}G_{ds}^{m}CₖₛAₑₛAₖₛGₑₛ^{m}Cₖ | | |
| 1341356 | N/A | N/A | 12419 | 12434 | GTAACGGTGATCAAAT | GₖₛTₖₛA_{ds}A_{ds}^{m}C_{ds}G_{ds}G_{ds}T_{ds}G_{ds} | 34 | 2345 |
| | | | | | | A_{ds}T_{ds}^{m}CₖₛAₑₛAₖₛAₑₛTₖ | | |
| 1341359 | N/A | N/A | 14199 | 14214 | TATTATGTGATTGAGT | TₖₛAₖₛT_{ds}T_{ds}A_{ds}T_{ds}G_{ds}T_{ds}G_{ds}A_{ds} | 65 | 73 |
| | | | | | | T_{ds}TₖₛGₑₛAₖₛGₑₛTₖ | | |
| 1341362 | N/A | N/A | 16384 | 16399 | AATCCCAACCAAACTT | AₖₛAₖₛT_{ds}^{m}C_{ds}^{m}ₖₛC_{ds}^{m}C_{ds}A_{ds}A_{ds}^{m} | 17 | 2755 |
| | | | | | | C_{ds}^{m}C_{ds}A_{ds}AₖₛAₑₛ^{m}CₖₛTₑₛTₖ | | |
| 1341367 | N/A | N/A | 16129 | 16144 | TCCATAATAATAGCTC | Tₖₛ^{m}Cₖₛ^{m}C_{ds}A_{ds}T_{ds}A_{ds}A_{ds}T_{ds}A_{ds} | 41 | 546 |
| | | | | | | A_{ds}T_{ds}AₖₛGₑₛ^{m}CₖₛTₑₛ^{m}Cₖ | | |
| 1341369 | N/A | N/A | 16223 | 16238 | CTTTTTATAGACTGGG | ^{m}CₖₛTₖₛT_{ds}T_{ds}T_{ds}T_{ds}A_{ds}T_{ds}A_{ds}G | 37 | 857 |
| | | | | | | _{ds}A_{ds}^{m}CₖₛTₑₛGₖₛGₑₛGₖ | | |
| 1341372 | N/A | N/A | 18097 | 18112 | GAAATTGATACACCAA | GₖₛAₖₛA_{ds}A_{ds}T_{ds}T_{ds}G_{ds}A_{ds}T_{ds}A_{d} | 68 | 315 |
| | | | | | | ₛ^{m}C_{ds}Aₖₛ^{m}Cₑₛ^{m}CₖₛAₑₛAₖ | | |
| 1341373 | N/A | N/A | 17990 | 18005 | TTAGTATAGTTATCTT | TₖₛTₖₛA_{ds}G_{ds}T_{ds}A_{ds}T_{ds}A_{ds}G_{ds}T_{ds} | 33 | 2366 |
| | | | | | | T_{ds}AₖₛTₑₛ^{m}CₖₛTₑₛTₖ | | |
| 1341383 | N/A | N/A | 18697 | 18712 | CAAAAGACTTTGAGAC | ^{m}CₖₛAₖₛA_{ds}A_{ds}A_{ds}G_{ds}A_{ds}^{m}C_{ds}T_{d} | 32 | 2186 |
| | | | | | | ₛT_{ds}T_{ds}GₖₛAₑₛGₖₛAₑₛ^{m}Cₖ | | |
| 1341386 | N/A | N/A | 19910 | 19925 | CATCTTAAGATACCCA | ^{m}CₖₛAₖₛT_{ds}^{m}C_{ds}T_{ds}T_{ds}A_{ds}A_{ds}G_{ds} | 59 | 475 |
| | | | | | | A_{ds}T_{ds}Aₖₛ^{m}Cₑₛ^{m}Cₖₛ^{m}CₑₛAₖ | | |
| 1341394 | N/A | N/A | 20385 | 20400 | TAGTAATCACAAGTAA | TₖₛAₖₛG_{ds}T_{ds}A_{ds}A_{ds}T_{ds}^{m}C_{ds}A_{ds}^{m} | 55 | 1489 |
| | | | | | | C_{ds}A_{ds}AₖₛGₑₛTₖₛAₑₛAₖ | | |
| 1341395 | N/A | N/A | 20112 | 20127 | ATCAAGACATTCTAGC | AₖₛTₖₛ^{m}C_{ds}A_{ds}A_{ds}G_{ds}A_{ds}^{m}C_{ds}A_{d} | 30 | 1488 |
| | | | | | | ₛT_{ds}T_{ds}^{m}CₖₛTₑₛAₖₛGₑₛ^{m}Cₖ | | |
| 1341397 | N/A | N/A | 20192 | 20207 | GCAGTTATTAGAAGTC | Gₖₛ^{m}CₖₛA_{ds}G_{ds}T_{ds}T_{ds}A_{ds}T_{ds}T_{ds}A | 68 | 398 |
| | | | | | | _{ds}G_{ds}AₖₛAₑₛGₖₛTₑₛ^{m}Cₖ | | |
| 1341402 | N/A | N/A | 12799 | 12814 | GCTGTAAGAGTCAGTA | Gₖₛ^{m}CₖₛT_{ds}G_{ds}T_{ds}A_{ds}A_{ds}G_{ds}A_{ds} | 42 | 693 |
| | | | | | | G_{ds}T_{ds}^{m}CₖₛAₑₛGₖₛTₑₛAₖ | | |
| 1341404 | N/A | N/A | 12499 | 12514 | AGAAATTCACCTTGAC | AₖₛGₖₛA_{ds}A_{ds}A_{ds}T_{ds}T_{ds}^{m}C_{ds}A_{ds}^{m} | 33 | 2284 |
| | | | | | | C_{ds}^{m}C_{ds}TₖₛTₑₛGₖₛAₑₛ^{m}Cₖ | | |
| 1341408 | N/A | N/A | 20486 | 20501 | AACTTCATAGTGGACT | AₖₛAₖₛ^{m}C_{ds}T_{ds}T_{ds}^{m}C_{ds}A_{ds}T_{ds}A_{ds} | 68 | 2555 |
| | | | | | | G_{ds}T_{ds}GₖₛGₑₛAₖₛ^{m}CₑₛTₖ | | |
| 1341416 | N/A | N/A | 13956 | 13971 | TACCTCTAAGTTAGCC | TₖₛAₖₛ^{m}C_{ds}^{m}C_{ds}T_{ds}^{m}C_{ds}T_{ds}A_{ds}A_{d} | 20 | 2249 |
| | | | | | | ₛG_{ds}T_{ds}TₖₛAₑₛGₖₛ^{m}Cₑₛ^{m}Cₖ | | |
| 1341429 | N/A | N/A | 14192 | 14207 | TGATTGAGTTCTCCAC | TₖₛGₖₛA_{ds}T_{ds}T_{ds}G_{ds}A_{ds}G_{ds}T_{ds}T_{ds} | 32 | 2116 |
| | | | | | | ^{m}C_{ds}Tₖₛ^{m}Cₑₛ^{m}CₖₛAₑₛ^{m}Cₖ | | |
| 1341535 | 1074 | 1089 | 20889 | 20904 | TGCCAAACCAATGTTT | TₖₛGₖₛ^{m}C_{ds}^{m}C_{ds}A_{ds}A_{ds}A_{ds}^{m}C_{ds}^{m} | 61 | 2673 |
| | | | | | | C_{ds}A_{ds}A_{ds}TₖₛGₑₛTₖₛTₑₛTₖ | | |
| 1341539 | 1310 | 1325 | 21125 | 21140 | CTTAAACCTTCCCTGT | ^{m}CₖₛTₖₛT_{ds}A_{ds}A_{ds}A_{ds}^{m}C_{ds}^{m}C_{ds}T_{d} | 36 | 1823 |
| | | | | | | ₛT_{ds}^{m}C_{ds}^{m}Cₖₛ^{m}CₑₛTₖₛGₑₛTₖ | | |
| 1341549 | 1330 | 1345 | 21145 | 21160 | TGGAATGCTACTTGAA | TₖₛGₖₛG_{ds}A_{ds}A_{ds}T_{ds}G_{ds}^{m}C_{ds}T_{ds} | 68 | 2203 |
| | | | | | | A_{ds}^{m}C_{ds}TₖₛTₑₛGₖₛAₑₛAₖ | | |
| 1341556 | 1336 | 1351 | 21151 | 21166 | ACAGATTGGAATGCTA | Aₖₛ^{m}CₖₛA_{ds}G_{ds}A_{ds}T_{ds}T_{ds}G_{ds}G_{ds} | 49 | 1668 |
| | | | | | | A_{ds}A_{ds}TₖₛGₑₛ^{m}CₖₛTₑₛAₖ | | |
| 1341570 | 1707 | 1722 | 21522 | 21537 | TCTGGGACCAAGGATA | Tₖₛ^{m}CₖₛT_{ds}G_{ds}G_{ds}G_{ds}A_{ds}^{m}C_{ds}^{m}C | 56 | 1830 |
| | | | | | | _{ds}A_{ds}A_{ds}GₖₛGₑₛAₖₛTₑₛAₖ | | |
| 1341572 | 1616 | 1631 | 21431 | 21446 | GGTCACCTTTCATAAT | GₖₛGₖₛT_{ds}^{m}C_{ds}A_{ds}^{m}C_{ds}^{m}C_{ds}T_{ds}T_{d} | 52 | 1985 |
| | | | | | | ₛT_{ds}^{m}C_{ds}AₖₛTₑₛAₖₛAₑₛTₖ | | |
| 1341579 | 1771 | 1786 | 21586 | 21601 | TAGCCAGTACAGTTCC | TₖₛAₖₛG_{ds}^{m}C_{ds}^{m}C_{ds}A_{ds}G_{ds}T_{ds}A_{ds} | 57 | 1987 |
| | | | | | | ^{m}C_{ds}A_{ds}GₖₛTₑₛTₖₛ^{m}cₑₛ^{m}Cₖ | | |
| 1341581 | 1716 | 1731 | 21531 | 21546 | CTAAACATCTCTGGGA | ^{m}CₖₛTₖₛA_{ds}A_{ds}A_{ds}^{m}C_{ds}A_{ds}T_{ds}^{m}C | 29 | 2259 |
| | | | | | | _{ds}T_{ds}^{m}C_{ds}TₖₛGₑₛGₖₛGₑₛAₖ | | |
| 1341582 | 2196 | 2211 | 22011 | 22026 | GATTAGTCTTGATGTA | GₖₛAₖₛT_{ds}T_{ds}A_{ds}G_{ds}T_{ds}^{m}C_{ds}T_{ds}T | 56 | 1521 |
| | | | | | | _{ds}G_{ds}AₖₛTₑₛGₖₛTₑₛAₖ | | |
| 1341584 | 1776 | 1791 | 21591 | 21606 | TGTAATAGCCAGTACA | TₖₛGₖₛT_{ds}A_{ds}A_{ds}T_{ds}A_{ds}G_{ds}^{m}C_{ds}^{m} | 45 | 352 |
| | | | | | | C_{ds}A_{ds}GₖₛTₑₛAₖₛ^{m}CₑₛAₖ | | |
| 1341592 | N/A | N/A | 11578 | 11593 | GTTATTCTCTTGACAA | GₖₛTₖₛT_{ds}A_{ds}T_{ds}T_{ds}^{m}C_{ds}T_{ds}^{m}C_{ds} | 27 | 2575 |
| | | | | | | T_{ds}T_{ds}GₖₛAₑₛ^{m}CₖₛAₑₛAₖ | | |
| 1341602 | N/A | N/A | 16292 | 16307 | TTAGTTAGAATAGTCT | TₖₛTₖₛA_{ds}G_{ds}T_{ds}T_{ds}A_{ds}G_{ds}A_{ds}A_{d} | 53 | 1714 |
| | | | | | | ₛT_{ds}AₖₛGₑₛTₖₛ^{m}CₑₛTₖ | | |
| 1341617 | N/A | N/A | 17995 | 18010 | TGAAGTTAGTATAGTT | TₖₛGₖₛA_{ds}A_{ds}G_{ds}T_{ds}T_{ds}A_{ds}G_{ds}T_{d} | 46 | 1405 |
| | | | | | | ₛA_{ds}TₖₛAₑₛGₖₛTₑₛTₖ | | |

TABLE 42
Inhibition of HSD17B13 RNA by modified oligonucleotides targeting SEQ ID NO.: 1, and 2

| | SEQ | SEQ | SEQ | SEQ | | | | |
|---|---|---|---|---|---|---|---|---|
| | ID NO: | ID NO: | ID NO: | ID NO: | | | % | SEQ |
| Compound | 1 Start | 1 Stop | 2 Start | 2 Stop | Sequence | Chemistry Notation | in- | ID |
| Number | Site | Site | Site | Site | (5′ to 3′) | (5′ to 3′) | hibition | NO |
| 1245927 | N/A | N/A | 3433 | 3448 | AGTAGATGGTAAGTCA | AₖₛGₖₛTₖₛA_{ds}G_{ds}A_{ds}T_{ds}G_{ds}G_{ds}T_{d} | 84 | 121 |
| | | | | | | ₛA_{ds}A_{ds}G_{ds}Tₖₛ^{m}CₖₛAₖ | | |
| 1246023 | N/A | N/A | 5046 | 5061 | GAGTGAATCATTCAGT | GₖₛAₖₛGₖₛT_{ds}G_{ds}A_{ds}A_{ds}T_{ds}^{m}C_{ds} | 83 | 1526 |
| | | | | | | A_{ds}T_{ds}T_{ds}^{m}C_{ds}AₖₛGₖₛTₖ | | |
| 1340984 | 1497 | 1512 | 21312 | 21327 | AGTTGCACCGTTTTGG | AₖₛGₖₛTₖₛT_{ds}G_{ds}^{m}C_{ds}A_{ds}^{m}C_{ds}^{m}C | 43 | 1905 |
| | | | | | | _{ds}G_{ds}T_{ds}T_{ds}TₖₛTₖₛGₖₛGₑ | | |
| 1340987 | 1489 | 1504 | 21304 | 21319 | CGTTTTGGGCTAATGA | ^{m}CₖₛGₖₛT_{ds}T_{ds}T_{ds}G_{ds}G_{ds}G_{ds}^{m} | 52 | 1282 |
| | | | | | | C_{ds}T_{ds}A_{ds}AₖₛTₖₛGₖₛAₑ | | |
| 1340990 | 1618 | 1633 | 21433 | 21448 | TCGGTCACCTTTCATA | Tₖₛ^{m}CₖₛGₖₛG_{ds}T_{ds}^{m}C_{ds}A_{ds}^{m}C_{ds}^{m} | 72 | 116 |
| | | | | | | C_{ds}T_{ds}T_{ds}T_{ds}^{m}CₖₛAₖₛTₖₛAₑ | | |
| 1340997 | 1622 | 1637 | 21437 | 21452 | AGAGTCGGTCACCTTT | AₖₛGₖₛAₖₛG_{ds}T_{ds}^{m}C_{ds}G_{ds}G_{ds}T_{ds}^{m} | 66 | 428 |
| | | | | | | C_{ds}A_{ds}^{m}C_{ds}^{m}CₖₛTₖₛTₖₛTₑ | | |
| 1341001 | 1626 | 1641 | 21441 | 21456 | AAATAGAGTCGGTCAC | AₖₛAₖₛAₖₛT_{ds}A_{ds}G_{ds}A_{ds}G_{ds}T_{ds}^{m} | 48 | 740 |
| | | | | | | C_{ds}G_{ds}G_{ds}Tₖₛ^{m}CₖₛAₖₛ^{m}Cₑ | | |
| 1341005 | 1630 | 1645 | 21445 | 21460 | TTTAAAATAGAGTCGG | TₖₛTₖₛTₖₛA_{ds}A_{ds}A_{ds}A_{ds}T_{ds}A_{ds}G_{d} | 58 | 1051 |
| | | | | | | ₛA_{ds}G_{ds}Tₖₛ^{m}CₖₛGₖₛGₑ | | |
| 1341018 | 1710 | 1725 | 21525 | 21540 | ATCTCTGGGACCAAGG | AₖₛTₖₛ^{m}CₖₛT_{ds}^{m}C_{ds}T_{ds}G_{ds}G_{ds}G_{ds} | 53 | 37 |
| | | | | | | A_{ds}^{m}C_{ds}^{m}C_{ds}AₖₛAₖₛGₖₛGₑ | | |
| 1341019 | 1714 | 1729 | 21529 | 21544 | AAACATCTCTGGGACC | AₖₛAₖₛAₖₛ^{m}C_{ds}A_{ds}T_{ds}^{m}C_{ds}T_{ds}^{m}C | 48 | 2129 |
| | | | | | | _{ds}T_{ds}G_{ds}G_{ds}GₖₛAₖₛ^{m}Cₖₛ^{m}Cₑ | | |
| 1341026 | 1768 | 1783 | 21583 | 21598 | CCAGTACAGTTCCTTT | ^{m}Cₖₛ^{m}CₖₛAₖₛG_{ds}T_{ds}A_{ds}^{m}C_{ds}A_{ds}G | 76 | 1753 |
| | | | | | | _{ds}T_{ds}T_{ds}^{m}C_{ds}^{m}CₖₛTₖₛTₖₛTₑ | | |
| 1341029 | 1750 | 1765 | 21565 | 21580 | CTGTGTTAGCTTTAAT | ^{m}CₖₛTₖₛGₖₛT_{ds}G_{ds}T_{ds}T_{ds}A_{ds}G_{ds}^{m} | 50 | 1286 |
| | | | | | | C_{ds}T_{ds}T_{ds}TₖₛAₖₛAₖₛTₑ | | |
| 1341031 | 2193 | 2208 | 22008 | 22023 | TAGTCTTGATGTAGTG | TₖₛAₖₛGₖₛT_{ds}^{m}C_{ds}T_{ds}T_{ds}G_{ds}A_{ds}T | 61 | 1288 |
| | | | | | | _{ds}G_{ds}T_{ds}AₖₛGₖₛTₖₛGₑ | | |
| 1341036 | 1778 | 1793 | 21593 | 21608 | TATGTAATAGCCAGTA | TₖₛAₖₛTₖₛG_{ds}T_{ds}A_{ds}A_{ds}T_{ds}A_{ds}G_{d} | 82 | 508 |
| | | | | | | ₛ^{m}C_{ds}^{m}C_{ds}AₖₛGₖₛTₖₛAₑ | | |
| 1341038 | 1782 | 1797 | 21597 | 21612 | TTCTTATGTAATAGCC | TₖₛTₖₛ^{m}CₖₛT_{ds}T_{ds}A_{ds}T_{ds}G_{ds}T_{ds}A | 73 | 819 |
| | | | | | | _{ds}A_{ds}T_{ds}AₖₛGₖₛ^{m}Cₖₛ^{m}Cₑ | | |
| 1341047 | 2247 | 2262 | 22062 | 22077 | ATAGTCCATGCAAAAG | AₖₛTₖₛAₖₛG_{ds}T_{ds}^{m}C_{ds}^{m}C_{ds}A_{ds}T_{ds} | 29 | 2436 |
| | | | | | | G_{ds}^{m}C_{ds}A_{ds}AₖₛAₖₛAₖₛGₑ | | |
| 1341058 | N/A | N/A | 9330 | 9345 | CCTATATACATCCAAG | ^{m}Cₖₛ^{m}CₖₛTₖₛA_{ds}T_{ds}A_{ds}T_{ds}A_{ds}^{m}C_{d} | 63 | 1771 |
| | | | | | | ₛA_{ds}T_{ds}^{m}C_{ds}^{m}CₖₛAₖₛAₖₛGₑ | | |
| 1341063 | 1082 | 1097 | 20897 | 20912 | GCTGCTAGTGCCAAAC | Gₖₛ^{m}CₖₛTₖₛG_{ds}^{m}C_{ds}T_{ds}A_{ds}G_{ds}T_{ds} | 62 | 1587 |
| | | | | | | G_{ds}^{m}C_{ds}^{m}C_{ds}AₖₛAₖₛAₖₛ^{m}Cₑ | | |
| 1341064 | N/A | N/A | 11855 | 11870 | TAAGCAGAATTGTGAA | TₖₛAₖₛAₖₛG_{ds}^{m}C_{ds}A_{ds}G_{ds}A_{ds}A_{ds} | 52 | 2361 |
| | | | | | | T_{ds}T_{ds}G_{ds}TₖₛGₖₛAₖₛAₑ | | |
| 1341067 | N/A | N/A | 11571 | 11586 | TCTTGACAATGGTTGA | Tₖₛ^{m}CₖₛTₖₛT_{ds}G_{ds}A_{ds}^{m}C_{ds}A_{ds}A_{ds} | 61 | 2440 |
| | | | | | | T_{ds}G_{ds}G_{ds}TₖₛTₖₛGₖₛAₑ | | |
| 1341069 | N/A | N/A | 9964 | 9979 | GTGTAAGCTGAGAGTT | GₖₛTₖₛGₖₛT_{ds}A_{ds}A_{ds}G_{ds}^{m}C_{ds}T_{ds} | 45 | 2760 |
| | | | | | | G_{ds}A_{ds}G_{ds}AₖₛGₖₛTₖₛTₑ | | |
| 1341070 | N/A | N/A | 14199 | 14214 | TATTATGTGATTGAGT | TₖₛAₖₛTₖₛT_{ds}A_{ds}T_{ds}G_{ds}T_{ds}G_{ds}A_{ds} | 51 | 73 |
| | | | | | | T_{ds}T_{ds}GₖₛAₖₛGₖₛTₑ | | |
| 1341073 | N/A | N/A | 15498 | 15513 | TGCTGCATTAATGCCA | TₖₛGₖₛ^{m}CₖₛT_{ds}G_{ds}^{m}C_{ds}A_{ds}T_{ds}T_{ds} | 6 | 2485 |
| | | | | | | A_{ds}A_{ds}T_{ds}Gₖₛ^{m}Cₖₛ^{m}CₖₛAₑ | | |
| 1341079 | N/A | N/A | 14918 | 14933 | TAATACATTAGCAAGC | TₖₛAₖₛAₖₛT_{ds}A_{ds}^{m}C_{ds}A_{ds}T_{ds}T_{ds}A | 35 | 2266 |
| | | | | | | _{ds}G_{ds}^{m}C_{ds}AₖₛAₖₛGₖₛ^{m}Cₑ | | |
| 1341082 | N/A | N/A | 16380 | 16395 | CCAACCAAACTTCCAG | ^{m}Cₖₛ^{m}CₖₛAₖₛA_{ds}^{m}C_{ds}^{m}C_{ds}A_{ds}A_{ds} | 47 | 2539 |
| | | | | | | A_{ds}^{m}C_{ds}T_{ds}T_{ds}^{m}Cₖₛ^{m}CₖₛAₖₛGₑ | | |
| 1341083 | 1078 | 1093 | 20893 | 20908 | CTAGTGCCAAACCAAT | ^{m}CₖₛTₖₛAₖₛG_{ds}T_{ds}G_{ds}^{m}C_{ds}^{m}C_{ds}A | 61 | 1276 |
| | | | | | | _{ds}A_{ds}A_{ds}^{m}C_{ds}^{m}CₖₛAₖₛAₖₛTₑ | | |
| 1341085 | N/A | N/A | 16287 | 16302 | TAGAATAGTCTTCAGC | TₖₛAₖₛGₖₛA_{ds}A_{ds}T_{ds}A_{ds}G_{ds}T_{ds}^{m} | 50 | 1403 |
| | | | | | | C_{ds}T_{ds}T_{ds}^{m}CₖₛAₖₛGₖₛ^{m}Cₑ | | |
| 1341090 | N/A | N/A | 18697 | 18712 | CAAAAGACTTTGAGAC | ^{m}CₖₛAₖₛAₖₛA_{ds}A_{ds}G_{ds}A_{ds}^{m}C_{ds}T_{d} | 13 | 2186 |
| | | | | | | ₛT_{ds}T_{ds}G_{ds}AₖₛGₖₛAₖₛ^{m}Cₑ | | |
| 1341095 | N/A | N/A | 18099 | 18114 | CTGAAATTGATACACC | ^{m}CₖₛTₖₛGₖₛA_{ds}A_{ds}A_{ds}T_{ds}T_{ds}G_{ds} | 75 | 393 |
| | | | | | | A_{ds}T_{ds}A_{ds}^{m}CₖₛAₖₛ^{m}Cₖₛ^{m}Cₑ | | |
| 1341098 | N/A | N/A | 17992 | 18007 | AGTTAGTATAGTTATC | AₖₛGₖₛTₖₛT_{ds}A_{ds}G_{ds}T_{ds}A_{ds}T_{ds}A_{d} | 47 | 1249 |
| | | | | | | ₛG_{ds}T_{ds}TₖₛAₖₛTₖₛ^{m}Cₑ | | |
| 1341107 | N/A | N/A | 19907 | 19922 | CTTAAGATACCCAGGT | ^{m}CₖₛTₖₛTₖₛA_{ds}A_{ds}G_{ds}A_{ds}T_{ds}Aciₛ^{m} | 45 | 241 |
| | | | | | | C_{ds}^{m}C_{ds}^{m}C_{ds}AₖₛGₖₛGₖₛTₑ | | |
| 1341108 | N/A | N/A | 19911 | 19926 | GCATCTTAAGATACCC | Gₖₛ^{m}CₖₛAₖₛT_{ds}^{m}C_{ds}T_{ds}T_{ds}A_{ds}A_{ds} | 84 | 553 |
| | | | | | | G_{ds}A_{ds}T_{ds}Aₖₛ^{m}Cₖₛ^{m}Cₖₛ^{m}Cₑ | | |
| 1341110 | N/A | N/A | 20383 | 20398 | GTAATCACAAGTAAGG | GₖₛTₖₛAₖₛA_{ds}T_{ds}^{m}C_{ds}A_{ds}^{m}C_{ds}A_{ds} | 56 | 1411 |
| | | | | | | A_{ds}G_{ds}T_{ds}AₖₛAₖₛGₖₛGₑ | | |
| 1341116 | N/A | N/A | 20194 | 20209 | TTGCAGTTATTAGAAG | TₖₛTₖₛGₖₛ^{m}C_{ds}A_{ds}G_{ds}T_{ds}T_{ds}A_{ds}T | 10 | 2123 |
| | | | | | | _{ds}T_{ds}A_{ds}GₖₛAₖₛAₖₛGₑ | | |
| 1341122 | 1086 | 1101 | 20901 | 20916 | GACTGCTGCTAGTGCC | GₖₛAₖₛ^{m}CₖₛT_{ds}G_{ds}^{m}C_{ds}T_{ds}G_{ds}^{m}C | 49 | 1899 |
| | | | | | | _{ds}T_{ds}A_{ds}G_{ds}TₖₛGₖₛ^{m}Cₖₛ^{m}Cₑ | | |
| 1341123 | N/A | N/A | 12801 | 12816 | AGGCTGTAAGAGTCAG | AₖₛGₖₛGₖₛ^{m}C_{ds}T_{ds}G_{ds}T_{ds}A_{ds}A_{ds} | 49 | 2809 |
| | | | | | | G_{ds}A_{ds}G_{ds}Tₖₛ^{m}CₖₛAₖₛGₑ | | |
| 1341125 | N/A | N/A | 12503 | 12518 | TTGCAGAAATTCACCT | TₖₛTₖₛGₖₛ^{m}C_{ds}A_{ds}G_{ds}A_{ds}A_{ds}A_{ds} | 29 | 2528 |
| | | | | | | T_{ds}T_{ds}^{m}C_{ds}Aₖₛ^{m}Cₖₛ^{m}CₖₛTₑ | | |
| 1341134 | N/A | N/A | 13954 | 13969 | CCTCTAAGTTAGCCCC | ^{m}Cₖₛ^{m}CₖₛTₖₛ^{m}C_{ds}T_{ds}A_{ds}A_{ds}G_{ds}T_{d} | 16 | 1084 |
| | | | | | | ₛT_{ds}A_{ds}G_{ds}^{m}Cₖₛ^{m}Cₖₛ^{m}Cₖₛ^{m}Cₑ | | |
| 1341136 | N/A | N/A | 14168 | 14183 | ATAGCAAGCCAACAGA | AₖₛTₖₛAₖₛG_{ds}^{m}C_{ds}A_{ds}A_{ds}G_{ds}^{m}C_{d} | 30 | 2633 |
| | | | | | | ₛ^{m}C_{ds}A_{ds}A_{ds}^{m}CₖₛAₖₛGₖₛAₑ | | |
| 1341144 | 1258 | 1273 | 21073 | 21088 | TAGCTTTTGTCCACCT | TₖₛAₖₛGₖₛ^{m}C_{ds}T_{ds}T_{ds}T_{ds}T_{ds}G_{ds}T | 65 | 1900 |
| | | | | | | _{ds}^{m}C_{ds}^{m}C_{ds}Aₖₛ^{m}Cₖₛ^{m}CₖₛTₑ | | |
| 1341146 | 1200 | 1215 | 21015 | 21030 | ATGTTTATGTAAGCAC | AₖₛTₖₛGₖₛT_{ds}T_{ds}T_{ds}A_{ds}T_{ds}G_{ds}T_{ds} | 73 | 2622 |
| | | | | | | A_{ds}A_{ds}Gₖₛ^{m}CₖₛAₖₛ^{m}Cₑ | | |
| 1341148 | N/A | N/A | 14192 | 14207 | TGATTGAGTTCTCCAC | TₖₛGₖₛAₖₛT_{ds}T_{ds}G_{ds}A_{ds}G_{ds}T_{ds}T_{ds} | 30 | 2116 |
| | | | | | | ^{m}C_{ds}T_{ds}^{m}Cₖₛ^{m}CₖₛAₖₛ^{m}Cₑ | | |
| 1341149 | 606 | 621 | 10492 | 10507 | AATATGGGATGAGGTA | AₖₛAₖₛTₖₛA_{ds}T_{ds}G_{ds}G_{ds}G_{ds}A_{ds}T_{d} | 47 | 1424 |
| | | | | | | ₛG_{ds}A_{ds}GₖₛGₖₛTₖₛAₑ | | |
| 1341155 | 1312 | 1327 | 21127 | 21142 | GTCTTAAACCTTCCCT | GₖₛTₖₛ^{m}CₖₛT_{ds}T_{ds}A_{ds}A_{ds}A_{ds}^{m}C_{ds} | 50 | 1901 |
| | | | | | | ^{m}C_{ds}T_{ds}T_{ds}^{m}Cₖₛ^{m}Cₖₛ^{m}CₖₛTₑ | | |
| 1341157 | 1316 | 1331 | 21131 | 21146 | AACAGTCTTAAACCTT | AₖₛAₖₛ^{m}CₖₛA_{ds}G_{ds}T_{ds}^{m}C_{ds}T_{ds}T_{ds} | 57 | 188 |
| | | | | | | A_{ds}A_{ds}A_{ds}^{m}Cₖₛ^{m}CₖₛTₖₛTₑ | | |
| 1341161 | 1322 | 1337 | 21137 | 21152 | TACTTGAACAGTCTTA | TₖₛAₖₛ^{m}CₖₛT_{ds}T_{ds}G_{ds}A_{ds}A_{ds}^{m}C_{ds} | 65 | 656 |
| | | | | | | A_{ds}G_{ds}T_{ds}^{m}CₖₛTₖₛTₖₛAₑ | | |
| 1341162 | 1333 | 1348 | 21148 | 21163 | GATTGGAATGCTACTT | GₖₛAₖₛTₖₛT_{ds}G_{ds}G_{ds}A_{ds}AₖₛT_{ds}G_{d} | 59 | 1435 |
| | | | | | | ₛ^{m}C_{ds}T_{ds}Aₖₛ^{m}CₖₛTₖₛTₑ | | |
| 1341169 | 1326 | 1341 | 21141 | 21156 | ATGCTACTTGAACAGT | AₖₛTₖₛGₖₛ^{m}C_{ds}T_{ds}A_{ds}^{m}C_{ds}T_{ds}T_{ds} | 50 | 967 |
| | | | | | | G_{ds}A_{ds}A_{ds}^{m}CₖₛAₖₛGₖₛTₑ | | |
| 1341220 | 1342 | 1357 | 21157 | 21172 | ATGGCTACAGATTGGA | AₖₛTₖₛGₖₛG_{ds}^{m}C_{ds}T_{ds}A_{ds}^{m}C_{ds}A_{ds} | 65 | 111 |
| | | | | | | G_{ds}A_{ds}T_{ds}TₖₛGₖₛGₖₛAₑ | | |
| 1341283 | 1356 | 1371 | 21171 | 21186 | TGATATTCTGTGGCAT | TₖₛGₖₛAₖₛT_{ds}A_{ds}T_{ds}T_{ds}^{m}C_{ds}T_{ds}G | 74 | 1124 |
| | | | | | | _{ds}T_{ds}G_{ds}Gₖₛ^{m}CₖₛAₖₛTₑ | | |
| 1341309 | 1352 | 1367 | 21167 | 21182 | ATTCTGTGGCATGGCT | AₖₛTₖₛ^{m}C_{ds}T_{ds}G_{ds}T_{ds}G_{ds}G_{ds}^{m} | 68 | 2328 |
| | | | | | | C_{ds}A_{ds}T_{ds}GₖₛGₖₛ^{m}CₖₛTₑ | | |
| 1341366 | 1364 | 1379 | 21179 | 21194 | GTTCTTGTTGATATTC | GₖₛTₖₛTₖₛ^{m}C_{ds}T_{ds}T_{ds}G_{ds}T_{ds}T_{ds}G | 69 | 1436 |
| | | | | | | _{ds}A_{ds}T_{ds}AₖₛTₖₛTₖₛ^{m}Cₑ | | |
| 1341420 | 1418 | 1433 | 21233 | 21248 | TTGAGATAAAGCTGCC | TₖₛTₖₛGₖₛA_{ds}G_{ds}A_{ds}T_{ds}A_{ds}AₖₛA_{d} | 43 | 1670 |
| | | | | | | ₛG_{ds}^{m}C_{ds}TₖₛGₖₛ^{m}Cₖₛ^{m}Cₑ | | |
| 1341422 | 1389 | 1404 | 21204 | 21219 | TCTCTTAGCTGTGCAC | Tₖₛ^{m}CₖₛTₖₛ^{m}C_{ds}T_{ds}T_{ds}A_{ds}G_{ds}^{m}C_{d} | 69 | 346 |
| | | | | | | ₛT_{ds}G_{ds}T_{ds}Gₖₛ^{m}CₖₛAₖₛ^{m}Cₑ | | |
| 1341423 | 1422 | 1437 | 21237 | 21252 | CAGGTTGAGATAAAGC | ^{m}CₖₛAₖₛGₖₛG_{ds}T_{ds}T_{ds}G_{ds}A_{ds}G_{ds} | 63 | 1982 |
| | | | | | | A_{ds}T_{ds}A_{ds}AₖₛAₖₛGₖₛ^{m}Cₑ | | |
| 1341430 | 1493 | 1508 | 21308 | 21323 | GCACCGTTTTGGGCTA | Gₖₛ^{m}CₖₛAₖₛ^{m}C_{ds}^{m}C_{ds}G_{ds}T_{ds}T_{ds}T_{d} | 45 | 1593 |
| | | | | | | ₛT_{ds}G_{ds}G_{ds}Gₖₛ^{m}CₖₛTₖₛAₑ | | |
| 1341438 | 1504 | 1519 | 21319 | 21334 | AGAATAGAGTTGCACC | AₖₛGₖₛAₖₛA_{ds}T_{ds}A_{ds}G_{ds}A_{ds}G_{ds}T | 58 | 426 |
| | | | | | | _{ds}T_{ds}G_{ds}^{m}CₖₛAₖₛ^{m}Cₖₛ^{m}Cₑ | | |
| 1341440 | 1461 | 1476 | 21276 | 21291 | CTAGGGAAATCTTTCA | ^{m}CₖₛTₖₛAₖₛG_{ds}G_{ds}G_{ds}A_{ds}A_{ds}A_{ds} | 55 | 659 |
| | | | | | | T_{ds}^{m}C_{ds}T_{ds}TₖₛTₖₛ^{m}CₖₛAₑ | | |
| 1341443 | 1614 | 1629 | 21429 | 21444 | TCACCTTTCATAATGT | Tₖₛ^{m}CₖₛAₖₛ^{m}C_{ds}^{m}C_{ds}T_{ds}T_{ds}T_{ds}^{m} | 41 | 2109 |
| | | | | | | C_{ds}A_{ds}T_{ds}A_{ds}AₖₛTₖₛGₖₛTₑ | | |
| 1341444 | 805 | 820 | 15686 | 15701 | GTAAGTATTCCATCTA | GₖₛTₖₛAₖₛA_{ds}G_{ds}T_{ds}A_{ds}T_{ds}T_{ds}^{m}C | 39 | 1038 |
| | | | | | | _{ds}^{m}C_{ds}A_{ds}Tₖₛ^{m}CₖₛTₖₛAₑ | | |
| 1341445 | 613 | 628 | N/A | N/A | CTGGAACAATATGGGA | ^{m}CₖₛTₖₛGₖₛG_{ds}A_{ds}A_{ds}^{m}C_{ds}A_{ds}A_{d} | 36 | 1969 |
| | | | | | | ₛT_{ds}A_{ds}T_{ds}GₖₛGₖₛGₖₛAₑ | | |
| 1341452 | 1718 | 1733 | 21533 | 21548 | GTCTAAACATCTCTGG | GₖₛTₖₛ^{m}CₖₛT_{ds}A_{ds}A_{ds}A_{ds}^{m}C_{ds}A_{ds} | 49 | 429 |
| | | | | | | G_{ds}T_{ds}A_{ds}^{m}CₖₛAₖₛGₖₛTₑ | | |
| 1341453 | 1774 | 1789 | 21589 | 21604 | TAATAGCCAGTACAGT | TₖₛAₖₛAₖₛT_{ds}A_{ds}G_{ds}^{m}C_{ds}^{m}C_{ds}A_{ds} | 64 | 196 |
| | | | | | | G_{ds}T_{ds}A_{ds}^{m}CₖₛAₖₛGₖₛTₑ | | |
| 1341459 | 1074 | 1089 | 20889 | 20904 | TGCCAAACCAATGTTT | TₖₛGₖₛ^{m}Cₖₛ^{m}C_{ds}A_{ds}A_{ds}A_{ds}^{m}C_{ds}^{m} | 43 | 2673 |
| | | | | | | C_{ds}A_{ds}A_{ds}T_{ds}GₖₛTₖₛTₖₛTₑ | | |
| 1341461 | N/A | N/A | 9511 | 9526 | AATATTGAGGCACTGG | AₖₛAₖₛTₖₛA_{ds}T_{ds}T_{ds}G_{ds}A_{ds}G_{ds}G_{d} | 36 | 1538 |
| | | | | | | ₛ^{m}C_{ds}A_{ds}^{m}CₖₛTₖₛGₖₛGₑ | | |
| 1341462 | N/A | N/A | 9598 | 9613 | ATGTGAAGAGCTGGTA | AₖₛTₖₛGₖₛT_{ds}G_{ds}AₖₛA_{ds}G_{ds}A_{ds}G | 56 | 527 |
| | | | | | | _{ds}^{m}C_{ds}T_{ds}GₖₛGₖₛTₖₛAₑ | | |
| 1341464 | 2257 | 2272 | 22072 | 22087 | AAACAAGAGGATAGTC | AₖₛAₖₛAₖₛ^{m}C_{ds}A_{ds}A_{ds}G_{ds}A_{ds}G_{ds} | 45 | 744 |
| | | | | | | G_{ds}AₖₛT_{ds}AₖₛGₖₛTₖₛ^{m}Cₑ | | |
| 1341465 | 2186 | 2201 | 22001 | 22016 | GATGTAGTGGGAGTCG | GₖₛAₖₛTₖₛG_{ds}T_{ds}A_{ds}G_{ds}T_{ds}G_{ds}G_{d} | 42 | 743 |
| | | | | | | ₛG_{ds}A_{ds}GₖₛTₖₛ^{m}CₖₛGₑ | | |
| 1341470 | N/A | N/A | 12416 | 12431 | ACGGTGATCAAATGTA | Aₖₛ^{m}CₖₛGₖₛG_{ds}T_{ds}G_{ds}A_{ds}T_{ds}^{m}C_{ds} | 41 | 2205 |
| | | | | | | A_{ds}A_{ds}A_{ds}TₖₛGₖₛTₖₛAₑ | | |
| 1341472 | N/A | N/A | 12426 | 12441 | CAGGGTGGTAACGGTG | ^{m}CₖₛAₖₛGₖₛG_{ds}G_{ds}T_{ds}G_{ds}G_{ds}T_{ds} | 39 | 2729 |
| | | | | | | A_{ds}A_{ds}^{m}C_{ds}GₖₛGₖₛTₖₛGₑ | | |
| 1341478 | N/A | N/A | 17997 | 18012 | TATGAAGTTAGTATAG | TₖₛAₖₛTₖₛG_{ds}A_{ds}A_{ds}G_{ds}T_{ds}T_{ds}A_{d} | 13 | 1560 |
| | | | | | | ₛG_{ds}T_{ds}AₖₛTₖₛAₖₛGₑ | | |
| 1341480 | N/A | N/A | 16134 | 16149 | GATGCTCCATAATAAT | GₖₛAₖₛTₖₛG_{ds}^{m}C_{ds}T_{ds}^{m}C_{ds}^{m}C_{ds}A | 15 | 2049 |
| | | | | | | _{ds}T_{ds}A_{ds}A_{ds}TₖₛAₖₛAₖₛTₑ | | |
| 1341486 | N/A | N/A | 16124 | 16139 | AATAATAGCTCTATTG | AₖₛAₖₛTₖₛA_{ds}A_{ds}T_{ds}A_{ds}G_{ds}^{m}C_{ds} | 3 | 2410 |
| | | | | | | T_{ds}^{m}C_{ds}T_{ds}AₖₛTₖₛTₖₛGₑ | | |
| 1341494 | N/A | N/A | 19915 | 19930 | GAGTGCATCTTAAGAT | GₖₛAₖₛGₖₛT_{ds}G_{ds}^{m}C_{ds}A_{ds}T_{ds}^{m}C_{ds} | 34 | 2256 |
| | | | | | | T_{ds}T_{ds}A_{ds}AₖₛGₖₛAₖₛTₑ | | |
| 1341496 | N/A | N/A | 17987 | 18002 | GTATAGTTATCTTCTC | GₖₛTₖₛAₖₛT_{ds}A_{ds}G_{ds}T_{ds}T_{ds}AₖₛT_{ds} | 68 | 937 |
| | | | | | | ^{m}C_{ds}T_{ds}Tₖₛ^{m}CₖₛTₖₛ^{m}Cₑ | | |
| 1341499 | N/A | N/A | 20489 | 20504 | CATAACTTCATAGTGG | ^{m}CₖₛAₖₛTₖₛA_{ds}A_{ds}^{m}C_{ds}T_{ds}T_{ds}^{m}C_{d} | 16 | 866 |
| | | | | | | ₛA_{ds}T_{ds}A_{ds}GₖₛTₖₛGₖₛGₑ | | |
| 1341501 | N/A | N/A | 20109 | 20124 | AAGACATTCTAGCCTG | AₖₛAₖₛGₖₛA_{ds}^{m}C_{ds}A_{ds}T_{ds}T_{ds}^{m}C_{ds} | 40 | 2744 |
| | | | | | | T_{ds}A_{ds}G_{ds}^{m}Cₖₛ^{m}CₖₛTₖₛGₑ | | |
| 1341506 | N/A | N/A | 20119 | 20134 | TTACAGCATCAAGACA | TₖₛₖₛAₖₛ^{m}C_{ds}A_{ds}G_{ds}^{m}C_{ds}A_{ds}T_{ds} | 44 | 2409 |
| | | | | | | ^{m}C_{ds}A_{ds}A_{ds}GₖₛAₖₛ^{m}CₖₛAₑ | | |
| 1341517 | N/A | N/A | 20479 | 20494 | TAGTGGACTTCATTAG | TₖₛAₖₛGₖₛT_{ds}G_{ds}G_{ds}A_{ds}^{m}C_{ds}T_{ds}T | 22 | 2351 |
| | | | | | | _{ds}^{m}C_{ds}A_{ds}TₖₛTₖₛAₖₛGₑ | | |

TABLE 43
Inhibition of HSD17B13 RNA by modified oligonucleotides targeting SEQ ID NO.: 1, and 2

| | SEQ | SEQ | SEQ | SEQ | | | | |
|---|---|---|---|---|---|---|---|---|
| | ID NO: | ID NO: | ID NO: | ID NO: | | | % | SEQ |
| Compound | 1 Start | 1 Stop | 2 Start | 2 Stop | Sequence | Chemistry Notation | in- | ID |
| Number | Site | Site | Site | Site | (5′ to 3′) | (5′ to 3′) | hibition | NO |
| 1245927 | N/A | N/A | 3433 | 3448 | AGTAGATGGTAAGTCA | AₖₛGₖₛTₖₛA_{ds}G_{ds}A_{ds}T_{ds}G_{ds}G | 88 | 121 |
| | | | | | | _{ds}T_{ds}A_{ds}G_{ds}Tₖₛ^{m}CₖₛAₖ | | |
| 1246023 | N/A | N/A | 5046 | 5061 | GAGTGAATCATTCAGT | GₖₛAₖₛGₖₛT_{ds}G_{ds}A_{ds}A_{ksds}T_{ds}^{m} | 84 | 1526 |
| | | | | | | C_{ds}A_{ds}T_{ds}T_{ds}^{m}C_{ds}AₖₛGₖₛTₖ | | |
| 1340982 | 1490 | 1505 | 21305 | 21320 | CCGTTTTGGGCTAATG | ^{m}Cₖₛ^{m}CₖₛGₖₛT_{ds}T_{ds}T_{ds}T_{ds}G_{ds} | 69 | 1360 |
| | | | | | | G_{ds}G_{ds}^{m}C_{ds}T_{ds}AₖₛAₖₛTₖₛGₑ | | |
| 1340988 | 1494 | 1509 | 21309 | 21324 | TGCACCGTTTTGGGCT | TₖₛGₖₛ^{m}CₖA_{ds}^{m}C_{ds}^{m}C_{ds}G_{ds}T | 43 | 1671 |
| | | | | | | _{ds}T_{ds}T_{ds}T_{ds}G_{ds}GₖₛGₖₛ^{m}CₖₛTₑ | | |
| 1340993 | 1619 | 1634 | 21434 | 21449 | GTCGGTCACCTTTCAT | GₖₛTₖₛ^{m}CₖₛG_{ds}G_{ds}T_{ds}^{m}C_{ds}A_{d} | 68 | 194 |
| | | | | | | ₛ^{m}C_{ds}^{m}C_{ds}T_{ds}T_{ds}Tₖₛ^{m}CₖₛAₖₛTₑ | | |
| 1340994 | 1598 | 1613 | 21413 | 21428 | ATCTTATAAGACTATA | AₖₛTₖₛ^{m}CₖₛT_{ds}T_{ds}A_{ds}T_{ds}A_{ds} | 53 | 2661 |
| | | | | | | A_{ds}G_{ds}A_{ds}^{m}C_{ds}TₖₛAₖₛTₖₛAₑ | | |
| 1341006 | 1627 | 1642 | 21442 | 21457 | AAAATAGAGTCGGTCA | AₖₛAₖₛAₖₛA_{ds}T_{ds}A_{ds}G_{ds}A_{ds}G | 65 | 817 |
| | | | | | | _{ds}T_{ds}^{m}C_{ds}G_{Ds}GₖₛTₖₛ^{m}CₖₛAₑ | | |
| 1341008 | 808 | 823 | 15689 | 15704 | TTGGTAAGTATTCCAT | TₖₛTₖₛGₖₛG_{ds}T_{ds}A_{ds}A_{ds}G_{ds}T_{d} | 28 | 2750 |
| | | | | | | ₛA_{ds}T_{ds}T_{ds}^{m}Cₖₛ^{m}CₖₛAₖₛTₑ | | |
| 1341009 | 1623 | 1638 | 21438 | 21453 | TAGAGTCGGTCACCTT | TₖₛAₖₛCrₖₛA_{ds}G_{ds}T_{ds}^{m}C_{ds}G_{ds} | 59 | 506 |
| | | | | | | G_{ds}T_{ds}^{m}C_{ds}A_{ds}^{m}Cₖₛ^{m}CₖₛTₖₛTₑ | | |
| 1341012 | 1719 | 1734 | 21534 | 21549 | TGTCTAAACATCTCTG | TₖₛGₖₛTₖₛ^{m}C_{ds}T_{ds}A_{ds}A_{ds}A_{ds}^{m} | 69 | 507 |
| | | | | | | C_{ds}A_{ds}T_{ds}^{m}C_{ds}Tₖₛ^{m}CₖₛTₖₛGₑ | | |
| 1341014 | 1711 | 1726 | 21526 | 21541 | CATCTCTGGGACCAAG | ^{m}CₖₛAₖₛTₖₛ^{m}C_{ds}T_{ds}^{m}C_{ds}T_{ds}G | 42 | 117 |
| | | | | | | _{ds}G_{ds}G_{ds}A_{ds}^{m}C_{ds}^{m}CₖₛAₖₛAₖₛGₑ | | |
| 1341016 | 1715 | 1730 | 21530 | 21545 | TAAACATCTCTGGGAC | TₖₛAₖₛAₖₛA_{ds}^{m}C_{ds}A_{ds}T_{ds}^{m}C_{d} | 32 | 351 |
| | | | | | | ₛT_{ds}^{m}C_{ds}T_{ds}G_{ds}GₖₛGₖₛAₖₛ^{m}Cₑ | | |
| 1341020 | 1017 | 1032 | 20832 | 20847 | CAGCATTGATTCGAAA | ^{m}CₖₛAₖₛGₖₛ^{m}C_{ds}A_{ds}T_{ds}T_{ds}G_{d} | 53 | 263 |
| | | | | | | ₛA_{ds}T_{ds}T_{ds}^{m}C_{ds}GₖₛAₖₛAₖₛAₑ | | |
| 1341025 | 1775 | 1790 | 21590 | 21605 | GTAATAGCCAGTACAG | GₖₛTₖₛAₖₛA_{ds}T_{ds}A_{ds}G_{ds}^{m}C_{ds} | 62 | 274 |
| | | | | | | ^{m}C_{ds}A_{ds}G_{ds}T_{ds}Aₖₛ^{m}CₖₛAₖₛGₑ | | |
| 1341027 | 1751 | 1766 | 21566 | 21581 | CCTGTGTTAGCTTTAA | ^{m}Cₖₛ^{m}CₖₛTₖₛG_{ds}T_{ds}G_{ds}T_{ds}T_{ds} | 66 | 1364 |
| | | | | | | A_{ds}G_{ds}^{m}C_{ds}T_{ds}TₖₛTₖₛAₖₛAₑ | | |
| 1341028 | 1770 | 1785 | 21585 | 21600 | AGCCAGTACAGTTCCT | AₖₛGₖₛ^{m}Cₖₛ^{m}C_{ds}A_{ds}G_{ds}T_{ds}A_{d} | 59 | 1909 |
| | | | | | | ₛ^{m}C_{ds}A_{ds}G_{ds}T_{ds}Tₖₛ^{m}Cₖₛ^{m}CₖₛTₑ | | |
| 1341032 | 1779 | 1794 | 21594 | 21609 | TTATGTAATAGCCAGT | TₖₛTₖₛAₖₛT_{ds}G_{ds}T_{ds}A_{ds}A_{ds}T_{d} | 77 | 586 |
| | | | | | | ₛA_{ds}G_{ds}^{m}C_{ds}^{m}CₖₛAₖₛGₖₛTₑ | | |
| 1341035 | 2187 | 2202 | 22002 | 22017 | TGATGTAGTGGGAGTC | TₖₛGₖₛAₖₛT_{ds}G_{ds}T_{ds}A_{ds}G_{ds}T_{d} | 77 | 820 |
| | | | | | | ₛG_{ds}G_{ds}G_{ds}AₖₛGₖₛTₖₛ^{m}Cₑ | | |
| 1341037 | 1783 | 1798 | 21598 | 21613 | TTTCTTATGTAATAGC | TₖₛTₖₛTₖₛ^{m}C_{ds}T_{ds}T_{ds}A_{ds}T_{ds}G | 60 | 2128 |
| | | | | | | _{ds}T_{ds}A_{ds}A_{ds}TₖₛAₖₛGₖₛ^{m}Cₑ | | |
| 1341041 | 1079 | 1094 | 20894 | 20909 | GCTAGTGCCAAACCAA | Gₖₛ^{m}CₖₛTₖₛA_{ds}G_{ds}T_{ds}G_{ds}^{m}C_{d} | 70 | 1354 |
| | | | | | | ₛ^{m}C_{ds}A_{ds}A_{ds}A_{ds}^{m}Cₖₛ^{m}CₖₛAₖₛAₑ | | |
| 1341046 | 2250 | 2265 | 22065 | 22080 | AGGATAGTCCATGCAA | AₖₛGₖₛGₖₛA_{ds}T_{ds}A_{ds}G_{ds}T_{ds}^{m} | 61 | 2690 |
| | | | | | | C_{ds}^{m}C_{ds}A_{ds}T_{ds}Gₖₛ^{m}CₖₛAₖₛAₑ | | |
| 1341050 | N/A | N/A | 9332 | 9347 | ATCCTATATACATCCA | AₖₛTₖₛ^{m}Cₖₛ^{m}C_{ds}T_{ds}A_{ds}T_{ds}A_{ds} | 75 | 1927 |
| | | | | | | T_{ds}A_{ds}^{m}C_{ds}A_{ds}Tₖₛ^{m}Cₖₛ^{m}CₖₛAₑ | | |
| 1341052 | N/A | N/A | 9966 | 9981 | TAGTGTAAGCTGAGAG | TₖₛAₖₛGₖₛT_{ds}G_{ds}T_{ds}A_{ds}A_{ds}G | 82 | 1852 |
| | | | | | | _{ds}^{m}C_{ds}T_{ds}G_{ds}AₖₛG_{ksSks}Gₑ | | |
| 1341054 | N/A | N/A | 9601 | 9616 | CATATGTGAAGAGCTG | ^{m}CₖₛAₖₛTₖₛA_{ds}T_{ds}G_{ds}T_{ds}G_{ds} | 50 | 683 |
| | | | | | | A_{ds}A_{ds}G_{ds}A_{ds}Gₖₛ^{m}CₖₛTₖₛGₑ | | |
| 1341055 | N/A | N/A | 9514 | 9529 | ACTAATATTGAGGCAC | Aₖₛ^{m}CₖₛTₖₛA_{ds}A_{ds}T_{ds}A_{ds}T_{ds} | 62 | 1772 |
| | | | | | | T_{ds}G_{ds}A_{ds}G_{ds}Gₖₛ^{m}CₖₛAₖₛ^{m}Cₑ | | |
| 1341061 | N/A | N/A | 12419 | 12434 | GTAACGGTGATCAAAT | GₖₛTₖₛAₖₛA_{ds}^{m}C_{ds}G_{ds}G_{ds}T_{ds} | 32 | 2345 |
| | | | | | | G_{ds}A_{ds}T_{ds}^{m}C_{ds}AₖₛAₖₛAₖₛTₑ | | |
| 1341062 | N/A | N/A | 11548 | 11563 | TCTCTTGACAATGGTT | Tₖₛ^{m}CₖₛTₖₛ^{m}C_{ds}T_{ds}T_{ds}G_{ds}A_{ds} | 84 | 1389 |
| | | | 11573 | 11588 | | ^{m}C_{ds}A_{ds}A_{ds}T_{ds}GₖₛGₖₛTₖₛTₑ | 100 | |
| 1341080 | N/A | N/A | 16289 | 16304 | GTTAGAATAGTCTTCA | GₖₛTₖₛTₖₛA_{ds}G_{ds}A_{ds}A_{ds}T_{ds}A | 71 | 1481 |
| | | | | | | _{ds}G_{ds}T_{ds}^{m}C_{ds}TₖₛTₖₛ^{m}CₖₛAₑ | | |
| 1341087 | N/A | N/A | 16382 | 16397 | TCCCAACCAAACTTCC | Tₖₛ^{m}Cₖₛ^{m}Cₖₛ^{m}C_{ds}A_{ds}A_{ds}^{m}C_{ds} | 24 | 2026 |
| | | | | | | ^{m}C_{ds}A_{ds}A_{ds}A_{ds}^{m}C_{ds}TₖₛTₖₛ^{m}Cₖₛ^{m}Cₑ | | |
| 1341088 | N/A | N/A | 16127 | 16142 | CATAATAATAGCTCTA | ^{m}CₖₛAₖₛTₖₛA_{ds}A_{ds}T_{ds}A_{ds}A_{ds} | 55 | 2511 |
| | | | | | | T_{ds}A_{ds}G_{ds}^{m}C_{ds}Tₖₛ^{m}CₖₛTₖₛAₑ | | |
| 1341093 | 1083 | 1098 | 20898 | 20913 | TGCTGCTAGTGCCAAA | TₖₛGₖₛ^{m}CₖₛT_{ds}G_{ds}^{m}C_{ds}T_{ds}A_{ds} | 56 | 1665 |
| | | | | | | G_{ds}T_{ds}G_{ds}^{m}C_{ds}^{m}CₖₛAₖₛAₖₛAₑ | | |
| 1341097 | N/A | N/A | 17989 | 18004 | TAGTATAGTTATCTTC | TₖₛAₖₛGₖₛT_{ds}A_{ds}T_{ds}A_{ds}G_{ds}T_{d} | 28 | 1093 |
| | | | | | | ₛT_{ds}A_{ds}T_{ds}^{m}CₖₛTₖₛTₖₛ^{m}Cₑ | | |
| 1341099 | N/A | N/A | 17994 | 18009 | GAAGTTAGTATAGTTA | GₖₛAₖₛAₖₛG_{ds}T_{ds}T_{ds}A_{ds}G_{ds}T | 75 | 1327 |
| | | | | | | _{ds}A_{ds}T_{ds}A_{ds}GₖₛTₖₛTₖₛAₑ | | |
| 1341100 | N/A | N/A | 19908 | 19923 | TCTTAAGATACCCAGG | Tₖₛ^{m}CₖₛTₖₛT_{ds}A_{ds}A_{ds}G_{ds}A_{ds} | 48 | 319 |
| | | | | | | T_{ds}A_{ds}^{m}C_{ds}^{m}C_{ds}^{m}CₖₛAₖₛGₖₛGₑ | | |
| 1341105 | N/A | N/A | 19912 | 19927 | TGCATCTTAAGATACC | TₖₛGₖₛ^{m}CₖₛA_{ds}T_{ds}^{m}C_{ds}T_{ds}T_{ds} | 37 | 2050 |
| | | | | | | A_{ds}A_{ds}G_{ds}A_{ds}TₖₛAₖₛ^{m}Cₖₛ^{m}Cₑ | | |
| 1341113 | N/A | N/A | 20385 | 20400 | TAGTAATCACAAGTAA | TₖₛAₖₛGₖₛT_{ds}A_{ds}A_{ds}T_{ds}^{m}C_{ds} | 65 | 1489 |
| | | | | | | A_{ds}^{m}C_{ds}A_{ds}A_{ds}GₖₛTₖₛAₖₛAₑ | | |
| 1341114 | N/A | N/A | 20112 | 20127 | ATCAAGACATTCTAGC | ATₖₛ^{m}CₖₛA_{ds}A_{ds}G_{ds}A_{ds}^{m}C_{d} | 52 | 1488 |
| | | | | | | ₛA_{ds}T_{ds}T_{ds}^{m}C_{ds}TₖₛAₖₛGₖₛ^{m}Cₑ | | |
| 1341119 | 1088 | 1103 | 20903 | 20918 | TTGACTGCTGCTAGTG | TₖₛTₖₛGₖₛA_{ds}^{m}C_{ds}T_{ds}G_{ds}^{m}C_{ds} | 50 | 28 |
| | | | | | | T_{ds}G_{ds}^{m}C_{ds}T_{ds}AₖₛGₖₛTₖₛGₑ | | |
| 1341127 | N/A | N/A | 20482 | 20497 | TCATAGTGGACTTCAT | Tₖₛ^{m}CₖₛAₖₛT_{ds}A_{ds}G_{ds}T_{ds}G_{ds} | 54 | 633 |
| | | | | | | G_{ds}A_{ds}^{m}C_{ds}T_{ds}Tₖₛ^{m}CₖₛAₖₛTₑ | | |
| 1341130 | N/A | N/A | 13956 | 13971 | TACCTCTAAGTTAGCC | TₖₛAₖₛ^{m}Cₖₛ^{m}C_{ds}T_{ds}^{m}C_{ds}T_{ds}A | 30 | 2249 |
| | | | | | | _{ds}A_{ds}G_{ds}T_{ds}T_{ds}AₖₛGₖₛ^{m}Cₖₛ^{m}Cₑ | | |
| 1341132 | N/A | N/A | 14194 | 14209 | TGTGATTGAGTTCTCC | TₖₛGₖₛTₖₛG_{ds}A_{ds}T_{ds}T_{ds}G_{ds}A_{d} | 52 | 2020 |
| | | | | | | ₛG_{ds}T_{ds}T_{ds}^{m}CₖₛTₖₛ^{m}Cₖₛ^{m}Cₑ | | |
| 1341133 | N/A | N/A | 14170 | 14185 | GAATAGCAAGCCAACA | GₖₛAₖₛAₖₛT_{ds}A_{ds}G_{ds}^{m}C_{ds}A_{ds} | 30 | 1708 |
| | | | | | | A_{ds}G_{ds}^{m}C_{ds}^{m}C_{ds}AₖₛAₖₛ^{m}CₖₛAₑ | | |
| 1341141 | 1259 | 1274 | 21074 | 21089 | GTAGCTTTTGTCCACC | GₖₛTₖₛAₖₛG_{ds}^{m}C_{ds}T_{ds}T_{ds}T_{ds}T | 67 | 1978 |
| | | | | | | _{ds}G_{ds}T_{ds}^{m}C_{ds}^{m}CₖₛAₖₛ^{m}Cₖₛ^{m}Cₑ | | |
| 1341147 | 1202 | 1217 | 21017 | 21032 | GTATGTTTATGTAAGC | GₖₛTₖₛAₖₛT_{ds}G_{ds}T_{ds}T_{ds}T_{ds}A_{d} | 71 | 1511 |
| | | | | | | ₛT_{ds}G_{ds}T_{ds}AₖₛAₖₛGₖₛ^{m}Cₑ | | |
| 1341152 | 1317 | 1332 | 21132 | 21147 | GAACAGTCTTAAACCT | GₖₛAₖₛAₖₛ^{m}C_{ds}A_{ds}G_{ds}T_{ds}^{m}C_{d} | 64 | 266 |
| | | | | | | ₛT_{ds}T_{ds}A_{ds}A_{ds}AₖₛAₖₛ^{m}Cₖₛ^{m}CₖₛTₑ | | |
| 1341159 | 1313 | 1328 | 21128 | 21143 | AGTCTTAAACCTTCCC | AₖₛGₖₛTₖₛ^{m}C_{ds}T_{ds}T_{ds}A_{ds}A_{ds} | 61 | 1979 |
| | | | | | | A_{ds}^{m}C_{ds}^{m}C_{ds}T_{ds}Tₖₛ^{m}Cₖₛ^{m}Cₖₛ^{m}Cₑ | | |
| 1341163 | 1327 | 1342 | 21142 | 21157 | AATGCTACTTGAACAG | AₖₛAₖₛTₖₛG_{ds}^{m}C_{ds}T_{ds}A_{ds}^{m}C_{d} | 50 | 1045 |
| | | | | | | ₛT_{ds}T_{ds}G_{ds}A_{ds}Aₖₛ^{m}CₖₛAₖₛGₑ | | |
| 1341168 | 1323 | 1338 | 21138 | 21153 | CTACTTGAACAGTCTT | ^{m}CₖₛTₖₛAₖₛ^{m}C_{ds}T_{ds}T_{ds}G_{ds}A_{ds} | 71 | 734 |
| | | | | | | A_{ds}^{m}C_{ds}A_{ds}G_{ds}Tₖₛ^{m}CₖₛTₖₛTₑ | | |
| 1341205 | 1335 | 1350 | 21150 | 21165 | CAGATTGGAATGCTAC | ^{m}CₖₛAₖₛGₖₛA_{ds}T_{ds}T_{ds}G_{ds}G_{ds} | 61 | 1590 |
| | | | | | | A_{ds}A_{ds}T_{ds}G_{ds}^{m}CₖₛTₖₛAₖₛ^{m}Cₑ | | |
| 1341216 | 1344 | 1359 | 21159 | 21174 | GCATGGCTACAGATTG | Gₖₛ^{m}CₖₛAₖₛT_{ds}G_{ds}G_{ds}^{m}C_{ds}T_{d} | 67 | 267 |
| | | | | | | ₛA_{ds}^{m}C_{ds}A_{ds}G_{ds}AₖₛTₖₛTₖₛGₑ | | |
| 1341223 | 696 | 711 | 12114 | 12129 | GACATGAGGTTTTGAT | GₖₛAₖₛ^{m}CₖₛA_{ds}T_{ds}G_{ds}A_{ds}G_{ds} | 55 | 647 |
| | | | | | | G_{ds}T_{ds}T_{ds}T_{ds}TIcₛGₖₛAₖₛTₑ | | |
| 1341244 | 1353 | 1368 | 21168 | 21183 | TATTCTGTGGCATGGC | TₖₛAₖₛTₖₛT_{ds}^{m}C_{ds}T_{ds}G_{ds}T_{ds}G | 74 | 890 |
| | | | | | | _{ds}G_{ds}^{m}C_{ds}A_{ds}TₖₛGₖₛGₖₛ^{m}Cₑ | | |
| 1341335 | 1357 | 1372 | 21172 | 21187 | TTGATATTCTGTGGCA | TₖₛTₖₛGₖₛA_{ds}T_{ds}A_{ds}T_{ds}T_{ds}^{m}C | 76 | 1202 |
| | | | | | | _{ds}T_{ds}G_{ds}T_{ds}GₖₛGₖₛ^{m}CₖₛAₑ | | |
| 1341353 | 1366 | 1381 | 21181 | 21196 | GTGTTCTTGTTGATAT | GₖₛTₖₛGₖₛT_{ds}T_{ds}^{m}C_{ds}T_{ds}T_{ds}G | 66 | 1514 |
| | | | | | | _{ds}T_{ds}T_{ds}G_{ds}AₖₛTₖₛAₖₛTₑ | | |
| 1341413 | 1391 | 1406 | 21206 | 21221 | GATCTCTTAGCTGTGC | GₖₛAₖₛTₖₛ^{m}C_{ds}T_{ds}^{m}C_{ds}T_{ds}T_{ds} | 70 | 502 |
| | | | | | | A_{ds}G_{ds}^{m}C_{ds}T_{ds}GₖₛTₖₛGₖₛ^{m}Cₑ | | |
| 1341424 | 794 | 809 | 15675 | 15690 | ATCTATCAGACTTCTT | AₖₛTₖₛ^{m}CₖₛT_{ds}A_{ds}T_{ds}^{m}C_{ds}A_{ds} | 51 | 2728 |
| | | | | | | G_{ds}A_{ds}^{m}C_{ds}T_{ds}Tₖₛ^{m}CₖₛTₖₛTₑ | | |
| 1341425 | 1423 | 1438 | 21238 | 21253 | CCAGGTTGAGATAAAG | ^{m}Cₖₛ^{m}CₖₛAₖₛG_{ds}G_{ds}T_{ds}T_{ds}G_{d} | 51 | 33 |
| | | | | | | ₛA_{ds}G_{ds}A_{ds}T_{ds}AₖₛAₖₛAₖₛGₑ | | |
| 1341433 | 1464 | 1479 | 21279 | 21294 | AGGCTAGGGAAATCTT | AₖₛGₖₛGₖₛ^{m}C_{ds}T_{ds}A_{ds}G_{ds}G_{ds} | 55 | 892 |
| | | | | | | G_{ds}A_{ds}A_{ds}A_{ds}Tₖₛ^{m}CₖₛTₖₛTₑ | | |
| 1341434 | 1419 | 1434 | 21234 | 21249 | GTTGAGATAAAGCTGC | GₖₛTₖₛTₖₛG_{ds}A_{ds}G_{ds}AciₛT_{ds}A | 59 | 1748 |
| | | | | | | _{ds}A_{ds}A_{ds}G_{ds}^{m}CₖₛTₖₛGₖₛ^{m}Cₑ | | |
| 1341439 | 1615 | 1630 | 21430 | 21445 | GTCACCTTTCATAATG | GₖₛTₖₛ^{m}CₖₛA_{ds}^{m}C_{ds}^{m}C_{ds}T_{ds}T | 21 | 1907 |
| | | | | | | _{ds}T_{ds}^{m}C_{ds}A_{ds}T_{ds}AₖₛAₖₛTₖₛGₑ | | |
| 1341442 | 1498 | 1513 | 21313 | 21328 | GAGTTGCACCGTTTTG | GₖₛAₖₛGₖₛT_{ds}T_{ds}G_{ds}^{m}C_{ds}A_{ds} | 62 | 1983 |
| | | | | | | ^{m}C_{ds}^{m}C_{ds}G_{ds}T_{ds}TₖₛTₖₛTₖₛGₑ | | |
| 1341448 | 1705 | 1720 | 21520 | 21535 | TGGGACCAAGGATATA | TₖₛGₖₛGₖₛG_{ds}A_{ds}^{m}C_{ds}^{m}C_{ds}A_{d} | 55 | 1674 |
| | | | | | | ₛA_{ds}G_{ds}G_{ds}A_{ds}TₖₛAₖₛTₖₛAₑ | | |
| 1341458 | 2194 | 2209 | 22009 | 22024 | TTAGTCTTGATGTAGT | TₖₛTₖₛAₖₛG_{ds}T_{ds}^{m}C_{ds}T_{ds}T_{ds}G | 61 | 1366 |
| | | | | | | _{ds}A_{ds}T_{ds}G_{ds}TₖₛAₖₛGₖₛTₑ | | |
| 1341463 | 2350 | 2365 | 22165 | 22180 | ACTACAAGAGGTTATT | Aₖₛ^{m}CₖₛTₖₛA_{ds}^{m}C_{ds}A_{ds}A_{ds}G_{d} | 58 | 899 |
| | | | | | | ₛA_{ds}G_{ds}G_{ds}T_{ds}TₖₛAₖₛTₖₛTₑ | | |
| 1341468 | N/A | N/A | 14204 | 14219 | CAGATTATTATGTGAT | ^{m}CₖₛAₖₛGₖₛA_{ds}T_{ds}T_{ds}A_{ds}T_{ds} | 38 | 2723 |
| | | | | | | T_{ds}A_{ds}T_{ds}G_{ds}TₖₛGₖₛAₖₛTₑ | | |
| 1341471 | 1075 | 1090 | 20890 | 20905 | GTGCCAAACCAATGTT | GₖₛTₖₛGₖₛ^{m}C_{ds}^{m}C_{ds}A_{ds}A_{ds}A_{d} | 56 | 1042 |
| | | | | | | ₛ^{m}C_{ds}^{m}C_{ds}A_{ds}A_{ds}TₖₛGₖₛTₖₛTₑ | | |
| 1341473 | N/A | N/A | 11858 | 11873 | GATTAAGCAGAATTGT | GₖₛAₖₛTₖₛT_{ds}A_{ds}A_{ds}G_{ds}^{m}C_{ds} | 28 | 1156 |
| | | | | | | A_{ds}G_{ds}A_{ds}A_{ds}TₖₛTₖₛGₖₛTₑ | | |
| 1341475 | N/A | N/A | 11543 | 11558 | TGACAATGGTTGCCAC | TₖₛGₖₛAₖₛ^{m}C_{ds}A_{ds}A_{ds}T_{ds}G_{ds} | 45 | 1233 |
| | | | | | | G_{ds}T_{ds}T_{ds}G_{ds}^{m}Cₖₛ^{m}CₖₛAₖₛ^{m}Cₑ | | |
| 1341485 | N/A | N/A | 16218 | 16233 | TATAGACTGGGTAGGA | TₖₛAₖₛTₖₛA_{ds}G_{ds}A_{ds}^{m}C_{ds}T_{ds} | 55 | 2808 |
| | | | | | | G_{ds}G_{ds}G_{ds}T_{ds}AₖₛGₖₛGₖₛAₑ | | |
| 1341487 | N/A | N/A | 15491 | 15506 | TTAATGCCACCCTACC | TₖₛTₖₛAₖₛA_{ds}T_{ds}G_{ds}^{m}C_{ds}^{m}C_{ds} | 20 | 2304 |
| | | | | | | A_{ds}^{m}C_{ds}^{m}C_{ds}^{m}C_{ds}TₖₛAₖₛ^{m}Cₖₛ^{m}Cₑ | | |
| 1341489 | N/A | N/A | 18092 | 18107 | TGATACACCAATGCAG | TₖₛGₖₛAₖₛT_{ds}A_{ds}^{m}C_{ds}A_{ds}^{m}C_{d} | 58 | 2370 |
| | | | | | | ₛ^{m}C_{ds}A_{ds}A_{ds}T_{ds}Gₖₛ^{m}CₖₛAₖₛGₑ | | |
| 1341490 | N/A | N/A | 19916 | 19931 | GGAGTGCATCTTAAGA | GₖₛGₖₛAₖₛG_{ds}T_{ds}G_{ds}^{m}C_{ds}A_{ds} | 40 | 2810 |
| | | | | | | T_{ds}^{m}C_{ds}T_{ds}T_{ds}AₖₛAₖₛGₖₛAₑ | | |
| 1341491 | N/A | N/A | 19904 | 19919 | AAGATACCCAGGTTGC | AₖₛAₖₛGₖₛA_{ds}T_{ds}A_{ds}^{m}C_{ds}^{m}C_{d} | 69 | 2712 |
| | | | | | | ₛ^{m}C_{ds}A_{ds}G_{ds}G_{ds}TₖₛTₖₛGₖₛ^{m}Cₑ | | |
| 1341497 | N/A | N/A | 18690 | 18705 | CTTTGAGACTCTTGTT | ^{m}CₖₛTₖₛTₖₛT_{ds}G_{ds}A_{ds}G_{ds}A_{ds}^{m} | 57 | 2583 |
| | | | | | | C_{ds}T_{ds}^{m}C_{ds}T_{ds}TₖₛₖₛTₖₛTₑ | | |
| 1341502 | N/A | N/A | 20187 | 20202 | TATTAGAAGTCAGCCC | TₖₛAₖₛTₖₛT_{ds}A_{ds}G_{ds}A_{ds}A_{ds}G | 32 | 164 |
| | | | | | | _{ds}T_{ds}^{m}C_{ds}A_{ds}Gₖₛ^{m}Cₖₛ^{m}Cₖₛ^{m}Cₑ | | |
| 1341504 | N/A | N/A | 20197 | 20212 | ACATTGCAGTTATTAG | Aₖₛ^{m}CₖₛAₖₛT_{ds}T_{ds}G_{ds}^{m}C_{ds}A_{d} | 52 | 2309 |
| | | | | | | ₛG_{ds}T_{ds}T_{ds}A_{ds}TₖₛTₖₛAₖₛGₑ | | |
| 1341512 | N/A | N/A | 12794 | 12809 | AAGAGTCAGTATCCTC | AₖₛAₖₛGₖₛA_{ds}G_{ds}T_{ds}^{m}C_{ds}A_{ds} | 67 | 2572 |
| | | | | | | G_{ds}T_{ds}A_{ds}T_{ds}^{m}Cₖₛ^{m}CₖₛTₖₛ^{m}Cₑ | | |
| 1341514 | N/A | N/A | 12496 | 12511 | AATTCACCTTGACTAA | AₖₛAₖₛTₖₛT_{ds}^{m}C_{ds}A_{ds}^{m}C_{ds}^{m}C | 16 | 2144 |
| | | | | | | _{ds}T_{ds}T_{ds}G_{ds}A_{ds}^{m}CₖₛAₖₛAₑ | | |
| 1341515 | N/A | N/A | 12804 | 12819 | CTCAGGCTGTAAGAGT | ^{m}CₖₛTₖₛ^{m}CₖₛA_{ds}G_{ds}G_{ds}^{m}C_{ds}T | 21 | 2240 |
| | | | | | | _{ds}G_{ds}T_{ds}A_{ds}A_{ds}GₖₛAₖₛGₖₛTₑ | | |

TABLE 44
Inhibition of HSD17B13 RNA by modified oligonucleotides targeting SEQ ID NO.: 1, and 2

| | SEQ | SEQ | SEQ | SEQ | | | | |
|---|---|---|---|---|---|---|---|---|
| | ID NO: | ID NO: | ID NO: | ID NO: | | | % | SEQ |
| Compound | 1 Start | 1 Stop | 2 Start | 2 Stop | Sequence | Chemistry Notation | in- | ID |
| Number | Site | Site | Site | Site | (5′ to 3′) | (5′ to 3′) | hibition | NO |
| 1245927 | N/A | N/A | 3433 | 3448 | AGTAGATGGTAAGTCA | AₖₛGₖₛTₖₛA_{ds}G_{ds}A_{ds}T_{ds}G_{ds}G_{ds} | 79 | 121 |
| | | | | | | T_{ds}A_{ds}A_{ds}G_{ds}Tₖₛ^{m}CₖₛAₖ | | |
| 1246023 | N/A | N/A | 5046 | 5061 | GAGTGAATCATTCAGT | GₖₛAₖₛGₖₛT_{ds}G_{ds}A_{ds}A_{ds}T_{ds}^{m}C_{d} | 83 | 1526 |
| | | | | | | ₛA_{ds}T_{ds}T_{ds}^{m}C_{ds}AₖₛGₖₛTₖ | | |
| 1340981 | 1495 | 1510 | 21310 | 21325 | TTGCACCGTTTTGGGC | TₖₛTₖₛGₖₛ^{m}C_{ds}A_{ds}^{m}C_{ds}^{m}C_{ds}G_{ds} | 50 | 1749 |
| | | | | | | T_{ds}T_{ds}T_{ds}T_{ds}GₖₛGₖₛGₖₛ^{m}Cₑ | | |
| 1340983 | 1499 | 1514 | 21314 | 21329 | AGAGTTGCACCGTTTT | AₖₛGₖₛAₖₛG_{ds}T_{ds}T_{ds}G_{ds}^{m}C_{ds}A_{d} | 78 | 34 |
| | | | | | | ₛ^{m}C_{ds}^{m}C_{ds}G_{ds}TₖₛTₖₛTₖₛTₑ | | |
| 1340991 | 810 | 825 | 15691 | 15706 | TATTGGTAAGTATTCC | TₖₛAₖₛTₖₛT_{ds}G_{ds}G_{ds}T_{ds}A_{ds}A_{ds} | 48 | 1272 |
| | | | | | | G_{ds}T_{ds}A_{ds}TₖₛTₖₛ^{m}Cₖₛ^{m}Cₑ | | |
| 1340995 | 1620 | 1635 | 21435 | 21450 | AGTCGGTCACCTTTCA | AₖₛGₖₛTₖₛ^{m}C_{ds}G_{ds}G_{ds}T_{ds}^{m}C_{ds} | 75 | 272 |
| | | | | | | A_{ds}^{m}C_{ds}^{m}C_{ds}T_{ds}TₖₛTₖₛ^{m}CₖₛAₑ | | |
| 1340998 | 1600 | 1615 | 21415 | 21430 | GTATCTTATAAGACTA | GₖₛTₖₛAₖₛT_{ds}^{m}C_{ds}T_{ds}T_{ds}A_{ds}T_{ds} | 72 | 1595 |
| | | | | | | A_{ds}A_{ds}G_{ds}Aₖₛ^{m}CₖₛTₖₛAₑ | | |
| 1341000 | 1624 | 1639 | 21439 | 21454 | ATAGAGTCGGTCACCT | AₖₛTₖₛAₖₛG_{ds}A_{ds}G_{ds}T_{ds}^{m}C_{ds}G_{d} | 67 | 584 |
| | | | | | | ₛG_{ds}T_{ds}^{m}C_{ds}Aₖₛ^{m}Cₖₛ^{m}CₖₛTₑ | | |
| 1341002 | 1712 | 1727 | 21527 | 21542 | ACATCTCTGGGACCAA | Aₖₛ^{m}CₖₛAₖₛT_{ds}^{m}C_{ds}T_{ds}^{m}C_{ds}T_{ds} | 65 | 195 |
| | | | | | | G_{ds}G_{ds}G_{ds}A_{ds}^{m}Cₖₛ^{m}CₖₛAₖₛAₑ | | |
| 1341004 | 1628 | 1643 | 21443 | 21458 | TAAAATAGAGTCGGTC | TₖₛAₖₛAₖₛA_{ds}A_{ds}T_{ds}A_{ds}G_{ds}A_{ds} | 74 | 895 |
| | | | | | | G_{ds}T_{ds}^{m}C_{ds}GₖₛGₖₛTₖₛ^{m}Cₑ | | |
| 1341011 | 1752 | 1767 | 21567 | 21582 | TCCTGTGTTAGCTTTA | Tₖₛ^{m}Cₖₛ^{m}CₖₛT_{ds}G_{ds}T_{ds}G_{ds}T_{ds}T | 75 | 1442 |
| | | | | | | _{ds}A_{ds}G_{ds}^{m}C_{ds}TₖₛTₖₛTₖₛAₑ | | |
| 1341013 | 1721 | 1736 | 21536 | 21551 | ATTGTCTAAACATCTC | AₖₛTₖₛTₖₛG_{ds}T_{ds}^{m}C_{ds}T_{ds}A_{ds}A_{ds} | 71 | 585 |
| | | | | | | A_{ds}^{m}C_{ds}A_{ds}Tₖₛ^{m}CₖₛTₖₛ^{m}Cₑ | | |
| 1341017 | 1019 | 1034 | 20834 | 20849 | TGCAGCATTGATTCGA | TₖₛGₖₛ^{m}CₖₛA_{ds}G_{ds}^{m}C_{ds}A_{ds}T_{ds}T | 52 | 419 |
| | | | | | | _{ds}G_{ds}A_{ds}T_{ds}Tₖₛₛ^{m}CₖₛGₖₛAₑ | | |
| 1341030 | 1784 | 1799 | 21599 | 21614 | GTTTCTTATGTAATAG | GₖₛTₖₛTₖₛT_{ds}^{m}C_{ds}T_{ds}T_{ds}AₖₛT_{ds} | 44 | 897 |
| | | | | | | G_{ds}T_{ds}A_{ds}AₖₛTₖₛAₖₛGₑ | | |
| 1341033 | 2189 | 2204 | 22004 | 22019 | CTTGATGTAGTGGGAG | ^{m}CₖₛTₖₛTₖₛG_{ds}A_{ds}T_{ds}G_{ds}T_{ds}A_{ds} | 62 | 976 |
| | | | | | | G_{ds}T_{ds}G_{ds}GₖₛGₖₛAₖₛGₑ | | |
| 1341039 | 1780 | 1795 | 21595 | 21610 | CTTATGTAATAGCCAG | ^{m}CₖₛTₖₛTdₛA_{ds}T_{ds}G_{ds}T_{ds}A_{ds}A_{ds} | 70 | 664 |
| | | | | | | T_{ds}A_{ds}G_{ds}^{m}Cₖₛ^{m}CₖₛAₖₛGₑ | | |
| 1341042 | N/A | N/A | 9334 | 9349 | CGATCCTATATACATC | ^{m}CₖₛGₖₛAₖₛT_{ds}^{m}C_{ds}^{m}C_{ds}T_{ds}A_{ds} | 29 | 2788 |
| | | | | | | T_{ds}A_{ds}T_{ds}A_{ds}^{m}CₖₛAₖₛTₖₛ^{m}Cₑ | | |
| 1341043 | 2252 | 2267 | 22067 | 22082 | AGAGGATAGTCCATGC | AₖₛGₖₛAₖₛG_{ds}G_{ds}A_{ds}T_{ds}A_{ds}G_{ds} | 78 | 354 |
| | | | | | | T_{ds}^{m}C_{ds}^{m}C_{ds}AₖₛTₖₛGₖₛ^{m}Cₑ | | |
| 1341044 | 2353 | 2368 | 22168 | 22183 | ATAACTACAAGAGGTT | AₖₛTₖₛAₖₛA_{ds}^{m}C_{ds}T_{ds}A_{ds}^{m}C_{ds} | 67 | 1133 |
| | | | | | | A_{ds}A_{ds}G_{ds}A_{ds}GₖₛGₖₛTₖₛTₑ | | |
| 1341053 | N/A | N/A | 9968 | 9983 | AGTAGTGTAAGCTGAG | AₖₛGₖₛTₖₛA_{ds}G_{ds}T_{ds}G_{ds}T_{ds}A_{ds} | 71 | 2155 |
| | | | | | | A_{ds}G_{ds}^{m}C_{ds}TₖₛGₖₛAₖₛGₑ | | |
| 1341056 | N/A | N/A | 9516 | 9531 | ACACTAATATTGAGGC | Aₖₛ^{m}CₖₛAₖₛ^{m}C_{ds}T_{ds}A_{ds}A_{ds}T_{ds} | 68 | 1928 |
| | | | | | | A_{ds}T_{ds}T_{ds}G_{ds}AₖₛGₖₛGₖₛ^{m}Cₑ | | |
| 1341057 | N/A | N/A | 9603 | 9618 | CACATATGTGAAGAGC | ^{m}CₖₛAₖₛ^{m}CₖₛA_{ds}T_{ds}A_{ds}T_{ds}G_{ds}T | 74 | 760 |
| | | | | | | _{ds}G_{ds}A_{ds}A_{ds}GₖₛAₖₛGₖₛ^{m}Cₑ | | |
| 1341060 | N/A | N/A | 12421 | 12436 | TGGTAACGGTGATCAA | TₖₛGₖₛGₖₛT_{ds}A_{ds}A_{ds}^{m}C_{ds}G_{ds}G_{d} | 35 | 67 |
| | | | | | | ₛT_{ds}G_{ds}A_{ds}Tₖₛ^{m}CₖₛAₖₛAₑ | | |
| 1341068 | N/A | N/A | 11546 | 11561 | TCTTGACAATGGTTGC | Tₖₛ^{m}CₖₛTₖₛT_{ds}G_{ds}A_{ds}^{m}C_{ds}A_{ds}A | 77 | 2199 |
| | | | | | | _{ds}T_{ds}G_{ds}G_{ds}TₖₛTₖₛGₖₛ^{m}Cₑ | | |
| 1341071 | N/A | N/A | 15494 | 15509 | GCATTAATGCCACCCT | Gₖₛ^{m}CₖₛAₖₛT_{ds}T_{ds}A_{ds}A_{ds}T_{ds}G_{d} | 51 | 1012 |
| | | | | | | ₛ^{m}C_{ds}^{m}C_{ds}A_{ds}^{m}Cₖₛ^{m}Cₖₛ^{m}CₖₛTₑ | | |
| 1341075 | 608 | 623 | N/A | N/A | ACAATATGGGATGAGG | Aₖₛ^{m}CₖₛAₖₛA_{ds}T_{ds}A_{ds}T_{ds}G_{ds}G_{d} | 76 | 1579 |
| | | | | | | ₛG_{ds}A_{ds}T_{ds}GₖₛAₖₛGₖₛGₑ | | |
| 1341076 | N/A | N/A | 14914 | 14929 | ACATTAGCAAGCTAAG | Aₖₛ^{m}CₖₛAₖₛT_{ds}T_{ds}A_{ds}G_{ds}^{m}C_{ds} | 41 | 2065 |
| | | | | | | A_{ds}A_{ds}G_{ds}^{m}C_{ds}TₖₛAₖₛAₖₛGₑ | | |
| 1341077 | 1080 | 1095 | 20895 | 20910 | TGCTAGTGCCAAACCA | TₖₛGₖₛ^{m}CₖₛT_{ds}A_{ds}G_{ds}T_{ds}G_{ds}^{m}C | 73 | 1432 |
| | | | | | | _{ds}^{m}C_{ds}A_{ds}A_{ds}Aₖₛ^{m}Cₖₛ^{m}CₖₛAₑ | | |
| 1341081 | N/A | N/A | 16223 | 16238 | CTTTTTATAGACTGGG | ^{m}CₖₛTₖₛTₖₛT_{ds}T_{ds}T_{ds}A_{ds}T_{ds}A_{ds} | 44 | 857 |
| | | | | | | G_{ds}A_{ds}^{m}C_{ds}TₖₛGₖₛGₖₛGₑ | | |
| 1341084 | N/A | N/A | 16384 | 16399 | AATCCCAACCAAACTT | AₖₛAₖₛTₖₛ^{m}C_{ds}^{m}C_{ds}^{m}C_{ds}A_{ds}A_{ds} | 13 | 2755 |
| | | | | | | ^{m}C_{ds}^{m}C_{ds}A_{ds}A_{ds}Aₖₛ^{m}CₖₛTₖₛTₑ | | |
| 1341089 | N/A | N/A | 16129 | 16144 | TCCATAATAATAGCTC | Tₖₛ^{m}Cₖₛ^{m}CₖₛA_{ds}T_{ds}A_{ds}A_{ds}T_{ds}A | 66 | 546 |
| | | | | | | _{ds}A_{ds}T_{ds}A_{ds}Gₖₛ^{m}CₖₛTₖₛ^{m}Cₑ | | |
| 1341092 | N/A | N/A | 18095 | 18110 | AATTGATACACCAATG | AₖₛAₖₛTₖₛT_{ds}G_{ds}A_{ds}T_{ds}A_{ds}^{m}C_{d} | 53 | 2525 |
| | | | | | | ₛA_{ds}^{m}C_{ds}^{m}C_{ds}AₖₛAₖₛTₖₛGₑ | | |
| 1341096 | N/A | N/A | 17990 | 18005 | TTAGTATAGTTATCTT | TₖₛTₖₛAₖₛG_{ds}T_{ds}A_{ds}T_{ds}A_{ds}G_{ds} | 45 | 2366 |
| | | | | | | T_{ds}T_{ds}A_{ds}Tₖₛ^{m}CₖₛTₖₛTₑ | | |
| 1341101 | N/A | N/A | 19909 | 19924 | ATCTTAAGATACCCAG | AₖₛTₖₛ^{m}CₖₛT_{ds}T_{ds}A_{ds}A_{ds}G_{ds}A_{d} | 71 | 397 |
| | | | | | | ₛT_{ds}A_{ds}^{m}C_{ds}^{m}Cₖₛ^{m}CₖₛAₖₛGₑ | | |
| 1341102 | N/A | N/A | 18693 | 18708 | AGACTTTGAGACTCTT | AₖₛGₖₛAₖₛ^{m}C_{ds}T_{ds}T_{ds}T_{ds}G_{ds}A_{d} | 41 | 2804 |
| | | | | | | ₛG_{ds}A_{ds}^{m}C_{ds}Tₖₛ^{m}CₖₛTₖₛTₑ | | |
| 1341103 | N/A | N/A | 19913 | 19928 | GTGCATCTTAAGATAC | GₖₛTₖₛGₖₛ^{m}C_{ds}A_{ds}T_{ds}^{m}C_{ds}T_{ds}T | 29 | 2806 |
| | | | | | | _{ds}A_{ds}A_{ds}G_{ds}AₖₛTₖₛAₖₛ^{m}Cₑ | | |
| 1341115 | N/A | N/A | 20190 | 20205 | AGTTATTAGAAGTCAG | AₖₛGₖₛTₖₛT_{ds}A_{ds}T_{ds}T_{ds}A_{ds}G_{ds} | 56 | 2746 |
| | | | | | | A_{ds}A_{ds}G_{ds}Tₖₛ^{m}CₖₛAₖₛGₑ | | |
| 1341118 | N/A | N/A | 20114 | 20129 | GCATCAAGACATTCTA | Gₖₛ^{m}CₖₛAₖₛT_{ds}^{m}C_{ds}A_{ds}A_{ds}G_{ds} | 84 | 1565 |
| | | | | | | A_{ds}^{m}C_{ds}A_{ds}T_{ds}Tₖₛ^{m}CₖₛTₖₛAₑ | | |
| 1341120 | 1084 | 1099 | 20899 | 20914 | CTGCTGCTAGTGCCAA | ^{m}CₖₛTₖₛGₖₛ^{m}C_{ds}T_{ds}G_{ds}^{m}C_{ds}T_{ds} | 66 | 1743 |
| | | | | | | A_{ds}G_{ds}T_{ds}G_{ds}^{m}Cₖₛ^{m}CₖₛAₖₛAₑ | | |
| 1341121 | N/A | N/A | 12499 | 12514 | AGAAATTCACCTTGAC | AₖₛGₖₛAₖₛA_{ds}A_{ds}T_{ds}T_{ds}^{m}C_{ds}A_{d} | 7 | 2284 |
| | | | | | | ₛ^{m}C_{ds}^{m}C_{ds}T_{ds}TₖₛGₖₛAₖₛ^{m}Cₑ | | |
| 1341126 | N/A | N/A | 20484 | 20499 | CTTCATAGTGGACTTC | ^{m}CₖTₖₛTₖₛ^{m}C_{ds}A_{ds}T_{ds}A_{ds}G_{ds}T | 57 | 711 |
| | | | | | | _{ds}G_{ds}G_{ds}A_{ds}^{m}CₖₛTₖₛTₖₛ^{m}Cₑ | | |
| 1341131 | N/A | N/A | 14196 | 14211 | TATGTGATTGAGTTCT | TₖₛAₖₛTₖₛG_{ds}T_{ds}G_{ds}A_{ds}T_{ds}T_{ds} | 43 | 2367 |
| | | | | | | G_{ds}A_{ds}G_{ds}TₖₛTₖₛ^{m}CₖₛTₑ | | |
| 1341137 | N/A | N/A | 12797 | 12812 | TGTAAGAGTCAGTATC | TₖₛGₖₛTₖₛA_{ds}A_{ds}G_{ds}A_{ds}G_{ds}T_{ds} | 46 | 2652 |
| | | | | | | ^{m}C_{ds}A_{ds}G_{ds}TₖₛAₖₛTₖₛ^{m}Cₑ | | |
| 1341138 | N/A | N/A | 14172 | 14187 | TTGAATAGCAAGCCAA | TₖₛTₖₛGₖₛA_{ds}A_{ds}T_{ds}A_{ds}G_{ds}^{m}C_{d} | 33 | 1864 |
| | | | | | | ₛA_{ds}A_{ds}G_{ds}^{m}Cₖₛ^{m}CₖₛAₖₛAₑ | | |
| 1341143 | 1261 | 1276 | 21076 | 21091 | AGGTAGCTTTTGTCCA | AₖₛGₖₛGₖₛT_{ds}A_{ds}G_{ds}^{m}C_{ds}T_{ds}T_{d} | 58 | 109 |
| | | | | | | ₛT_{ds}T_{ds}G_{ds}Tₖₛ^{m}Cₖₛ^{m}CₖₛAₑ | | |
| 1341145 | 1256 | 1271 | 21071 | 21086 | GCTTTTGTCCACCTTT | Gₖₛ^{m}CₖₛTₖₛT_{ds}T_{ds}T_{ds}G_{ds}T_{ds}^{m}C | 81 | 1744 |
| | | | | | | _{ds}^{m}C_{ds}A_{ds}^{m}C_{ds}^{m}CₖₛTₖₛTₖₛTₑ | | |
| 1341150 | 1318 | 1333 | 21133 | 21148 | TGAACAGTCTTAAACC | TₖₛGₖₛAₖₛA_{ds}^{m}C_{ds}A_{ds}G_{ds}T_{ds}^{m} | 61 | 344 |
| | | | | | | C_{ds}T_{ds}T_{ds}A_{ds}AₖₛAₖₛ^{m}Cₖₛ^{m}Cₑ | | |
| 1341154 | 1314 | 1329 | 21129 | 21144 | CAGTCTTAAACCTTCC | ^{m}CₖₛAₖₛGₖₛT_{ds}^{m}C_{ds}T_{ds}T_{ds}A_{ds}A | 74 | 30 |
| | | | | | | _{ds}A_{ds}^{m}C_{ds}^{m}C_{ds}TₖₛTₖₛ^{m}Cₖₛ^{m}Cₑ | | |
| 1341160 | 698 | 713 | 12116 | 12131 | GAGACATGAGGTTTTG | GₖₛAₖₛGₖₛA_{ds}^{m}C_{ds}A_{ds}T_{ds}G_{ds}A | 61 | 725 |
| | | | | | | _{ds}G_{ds}G_{ds}T_{ds}TₖₛTₖₛTₖₛGₑ | | |
| 1341166 | 1324 | 1339 | 21139 | 21154 | GCTACTTGAACAGTCT | Gₖₛ^{m}CₖₛTₖₛA_{ds}^{m}C_{ds}T_{ds}T_{ds}G_{ds}A | 60 | 811 |
| | | | | | | _{ds}A_{ds}^{m}C_{ds}A_{ds}GₖₛTₖₛ^{m}CₖₛTₑ | | |
| 1341184 | 1329 | 1344 | 21144 | 21159 | GGAATGCTACTTGAAC | GₖₛGₖₛAₖₛA_{ds}T_{ds}G_{ds}^{m}C_{ds}T_{ds}A_{d} | 68 | 1201 |
| | | | | | | ₛ^{m}C_{ds}T_{ds}T_{ds}GₖₛAₖₛAₖₛ^{m}Cₑ | | |
| 1341194 | 1337 | 1352 | 21152 | 21167 | TACAGATTGGAATGCT | TₖₛAₖₛ^{m}CₖₛA_{ds}G_{ds}A_{ds}T_{ds}T_{ds}G_{d} | 66 | 1746 |
| | | | | | | ₛG_{ds}A_{ds}A_{ds}TₖₛGₖₛ^{m}CₖₛTₑ | | |
| 1341266 | 1349 | 1364 | 21164 | 21179 | CTGTGGCATGGCTACA | ^{m}CₖₛTₖₛGₖₛT_{ds}G_{ds}G_{ds}^{m}C_{ds}A_{ds}T | 58 | 657 |
| | | | | | | _{ds}G_{ds}G_{ds}^{m}C_{ds}TₖₛAₖₛ^{m}CₖₛAₑ | | |
| 1341295 | 1354 | 1369 | 21169 | 21184 | ATATTCTGTGGCATGG | AₖₛTₖₛAₖₛT_{ds}T_{ds}^{m}C_{ds}T_{ds}G_{ds}T_{ds} | 58 | 968 |
| | | | | | | G_{ds}G_{ds}^{m}C_{ds}AₖₛTₖₛGₖₛGₑ | | |
| 1341318 | 1358 | 1373 | 21173 | 21188 | GTTGATATTCTGTGGC | GₖₛTₖₛTₖₛG_{ds}A_{ds}T_{ds}A_{ds}T_{ds}T_{ds}^{m} | 73 | 1280 |
| | | | | | | C_{ds}T_{ds}G_{ds}TₖₛGₖₛGₖₛ^{m}Cₑ | | |
| 1341392 | 1367 | 1382 | 21182 | 21197 | TGTGTTCTTGTTGATA | TₖₛGₖₛTₖₛG_{ds}T_{ds}T_{ds}^{m}C_{ds}T_{ds}T_{ds} | 65 | 1591 |
| | | | | | | G_{ds}T_{ds}T_{ds}GₖₛAₖₛTₖₛAₑ | | |
| 1341400 | 796 | 811 | 15677 | 15692 | CCATCTATCAGACTTC | ^{m}Cₖₛ^{m}CₖₛAₖₛT_{ds}^{m}C_{ds}T_{ds}A_{ds}T_{ds} | 60 | 415 |
| | | | | | | ^{m}C_{ds}A_{ds}G_{ds}A_{ds}^{m}CₖₛTₖₛTₖₛ^{m}Cₑ | | |
| 1341421 | 1420 | 1435 | 21235 | 21250 | GGTTGAGATAAAGCTG | GₖₛGₖₛTₖₛT_{ds}G_{ds}A_{ds}G_{ds}A_{ds}T_{ds} | 67 | 1826 |
| | | | | | | A_{ds}A_{ds}A_{ds}Gₖₛ^{m}CₖₛTₖₛGₑ | | |
| 1341426 | 1393 | 1408 | 21208 | 21223 | TTGATCTCTTAGCTGT | TₖₛTₖₛGₖₛA_{ds}T_{ds}^{m}C_{ds}T_{ds}^{m}C_{ds}T | 64 | 658 |
| | | | | | | _{ds}T_{ds}A_{ds}G_{ds}^{m}CₖₛTₖₛGₖₛTₑ | | |
| 1341431 | 1429 | 1444 | 21244 | 21259 | ATATGTCCAGGTTGAG | AₖₛTₖₛAₖₛT_{ds}G_{ds}T_{ds}^{m}C_{ds}^{m}C_{ds}A | 71 | 425 |
| | | | | | | _{ds}G_{ds}G_{ds}T_{ds}TₖₛGₖₛAₖₛGₑ | | |
| 1341432 | 1491 | 1506 | 21306 | 21321 | ACCGTTTTGGGCTAAT | Aₖₛ^{m}Cₖₛ^{m}CₖₛG_{ds}T_{ds}T_{ds}T_{ds}T_{ds}G | 73 | 1438 |
| | | | | | | _{ds}G_{ds}G_{ds}^{m}C_{ds}TₖₛAₖₛAₖₛTₑ | | |
| 1341435 | 1466 | 1481 | 21281 | 21296 | AGAGGCTAGGGAAATC | AₖₛGcₛAₖG_{ds}G_{ds}^{m}C_{ds}T_{ds}A_{ds}G | 68 | 1048 |
| | | | | | | _{ds}G_{ds}G_{ds}A_{ds}AₖₛAₖₛTₖₛ^{m}Cₑ | | |
| 1341441 | 1616 | 1631 | 21431 | 21446 | GGTCACCTTTCATAAT | GₖₛGₖₛTₖₛ^{m}C_{ds}A_{ds}^{m}C_{ds}^{m}C_{ds}T_{ds} | 49 | 1985 |
| | | | | | | T_{ds}T_{ds}^{m}C_{ds}A_{ds}TₖₛAₖₛAₖₛTₑ | | |
| 1341449 | 1771 | 1786 | 21586 | 21601 | TAGCCAGTACAGTTCC | TₖₛAₖₛGₖₛ^{m}C_{ds}^{m}C_{ds}A_{ds}G_{ds}T_{ds} | 58 | 1987 |
| | | | | | | A_{ds}^{m}C_{ds}A_{ds}G_{ds}TₖₛTₖₛ^{m}Cₖₛ^{m}Cₑ | | |
| 1341451 | 1776 | 1791 | 21591 | 21606 | TGTAATAGCCAGTACA | TₖₛGₖₛTₖₛA_{ds}A_{ds}A_{ds}G_{ds}^{m}C_{d} | 34 | 352 |
| | | | | | | ₛ^{m}C_{ds}A_{ds}G_{ds}TₖₛAₖₛ^{m}CₖₛAₑ | | |
| 1341456 | 1707 | 1722 | 21522 | 21537 | TCTGGGACCAAGGATA | Tₖₛ^{m}CₖₛTₖₛG_{ds}G_{ds}G_{ds}A_{ds}^{m}C_{ds}^{m} | 57 | 1830 |
| | | | | | | C_{ds}A_{ds}A_{ds}G_{ds}GₖₛAₖₛTₖₛAₑ | | |
| 1341457 | 1716 | 1731 | 21531 | 21546 | CTAAACATCTCTGGGA | ^{m}CₖₛTₖₛAₖₛA_{ds}A_{ds}^{m}C_{ds}A_{ds}T_{ds}^{m} | 57 | 2259 |
| | | | | | | C_{ds}T_{ds}^{m}C_{ds}T_{ds}GₖₛGₖₛGₖₛAₑ | | |
| 1341466 | 2196 | 2211 | 22011 | 22026 | GATTAGTCTTGATGTA | GₖₛAₖₛTₖₛT_{ds}A_{ds}G_{ds}T_{ds}^{m}C_{ds}T_{ds} | 48 | 1521 |
| | | | | | | T_{ds}G_{ds}A_{ds}TₖₛGₖₛTₖₛAₑ | | |
| 1341474 | N/A | N/A | 11578 | 11593 | GTTATTCTCTTGACAA | GₖₛTₖₛTₖₛA_{ds}T_{ds}T_{ds}^{m}C_{ds}T_{ds}^{m}C | 35 | 2575 |
| | | | | | | _{ds}T_{ds}T_{ds}G_{ds}Aₖₛ^{m}CₖₛAₖₛAₑ | | |
| 1341482 | N/A | N/A | 16292 | 16307 | TTAGTTAGAATAGTCT | TₖₛTₖₛAₖₛG_{ds}T_{ds}T_{ds}A_{ds}G_{ds}A_{ds} | 67 | 1714 |
| | | | | | | A_{ds}T_{ds}A_{ds}GₖₛTₖₛ^{m}CₖₛTₑ | | |
| 1341488 | N/A | N/A | 19905 | 19920 | TAAGATACCCAGGTTG | TₖₛAₖₛAₖₛG_{ds}A_{ds}T_{ds}A_{ds}^{m}C_{ds}^{m} | 58 | 2790 |
| | | | | | | C_{ds}^{m}C_{ds}A_{ds}G_{ds}GₖₛTₖₛTₖₛGₑ | | |
| 1341492 | 1076 | 1091 | 20891 | 20906 | AGTGCCAAACCAATGT | AₖₛGₖₛTₖₛG_{ds}^{m}C_{ds}^{m}C_{ds}AdₛA_{ds} | 60 | 1120 |
| | | | | | | A_{ds}^{m}C_{ds}^{m}C_{ds}A_{ds}AₖₛTₖₛGₖₛTₑ | | |
| 1341495 | N/A | N/A | 17995 | 18010 | TGAAGTTAGTATAGTT | TₖₛGₖₛAₖₛA_{ds}G_{ds}T_{ds}T_{ds}A_{ds}G_{ds} | 70 | 1405 |
| | | | | | | T_{ds}A_{ds}T_{ds}AₖₛGₖₛTₖₛTₑ | | |
| 1341498 | N/A | N/A | 19999 | 20014 | CAGTTTTCCTCATGAT | ^{m}CₖₛAₖₛGₖₛT_{ds}T_{ds}T_{ds}T_{ds}^{m}C_{ds}^{m} | 65 | 2331 |
| | | | | | | C_{ds}T_{ds}^{m}C_{ds}A_{ds}TₖₛGₖₛAₖₛTₑ | | |
| 1341500 | N/A | N/A | 20378 | 20393 | CACAAGTAAGGTAAAG | ^{m}CₖₛAₖₛ^{m}CₖₛA_{ds}A_{ds}G_{ds}T_{ds}A_{ds} | 55 | 2448 |
| | | | | | | A_{ds}G_{ds}G_{ds}T_{ds}AₖₛAₖₛAₖₛGₑ | | |
| 1341503 | N/A | N/A | 20388 | 20403 | CTATAGTAATCACAAG | ^{m}CₖₛTₖₛAₖₛT_{ds}A_{ds}G_{ds}T_{ds}A_{ds}A_{d} | 53 | 1644 |
| | | | | | | ₛT_{ds}^{m}C_{ds}A_{ds}^{m}CₖₛAₖₛAₖₛGₑ | | |
| 1341510 | 1091 | 1106 | 20906 | 20921 | CGTTTGACTGCTGCTA | ^{m}CₖₛGₖₛTₖₛT_{ds}T_{ds}G_{ds}A_{ds}^{m}C_{ds}T | 75 | 264 |
| | | | | | | _{ds}G_{ds}^{m}C_{ds}T_{ds}Gₖₛ^{m}CₖₛTₖₛAₑ | | |
| 1341513 | N/A | N/A | 13959 | 13974 | GTCTACCTCTAAGTTA | GₖₛTₖₛ^{m}CₖₛT_{ds}A_{ds}^{m}C_{ds}^{m}C_{ds}T_{ds} | 41 | 2363 |
| | | | | | | ^{m}C_{ds}T_{ds}A_{ds}A_{ds}GₖₛTₖₛTₖₛAₑ | | |
| 1341516 | N/A | N/A | 13949 | 13964 | AAGTTAGCCCCCAGGA | AₖₛAₖₛGₖₛT_{ds}T_{ds}A_{ds}G_{ds}^{m}C_{ds}^{m} | 23 | 2811 |
| | | | | | | C_{ds}^{m}C_{ds}^{m}C_{ds}^{m}C_{ds}AₖₛGₖₛGₖₛAₑ | | |

TABLE 45
Inhibition of HSD17B13 RNA by modified oligonucleotides targeting SEQ ID NO.: 1, and 2

| | SEQ | SEQ | SEQ | SEQ | | | | |
|---|---|---|---|---|---|---|---|---|
| | ID NO: | ID NO: | ID NO: | ID NO: | | | % | SEQ |
| Compound | 1 Start | 1 Stop | 2 Start | 2 Stop | Sequence | Chemistry Notation | in- | ID |
| Number | Site | Site | Site | Site | (5′ to 3′) | (5′ to 3′) | hibition | NO |
| 1245927 | N/A | N/A | 3433 | 3448 | AGTAGATGGTAAGTCA | AₖₛGₖₛTₖₛA_{ds}G_{ds}A_{ds}T_{ds}G_{ds}G_{ds}T | 79 | 121 |
| | | | | | | _{ds}A_{ds}A_{ds}G_{ds}Tₖₛ^{m}CₖₛAₖ | | |
| 1246023 | N/A | N/A | 5046 | 5061 | GAGTGAATCATTCAGT | GₖₛAₖₛGₖₛT_{ds}G_{ds}A_{ds}A_{ds}T_{ds}^{m}C_{ds} | 80 | 1526 |
| | | | | | | A_{ds}T_{ds}T_{ds}^{m}C_{ds}AₖₛGₖₛTₖ | | |
| 1340980 | 610 | 625 | N/A | N/A | GAACAATATGGGATGA | GₖₛAₖₛAₖₛ^{m}C_{ds}A_{ds}A_{ds}T_{ds}A_{ds}T_{ds} | 52 | 1735 |
| | | | | | | G_{ds}G_{ds}G_{ds}AₖₛTₖₛGₖₛAₑ | | |
| 1340985 | 1492 | 1507 | 21307 | 21322 | CACCGTTTTGGGCTAA | ^{m}CₖₛAₖₛ^{m}Cₖₛ^{m}C_{ds}G_{ds}T_{ds}T_{ds}T_{ds}T | 71 | 1516 |
| | | | | | | _{ds}G_{ds}G_{ds}G_{ds}^{m}CₖₛTₖₛAₖₛAₑ | | |
| 1340986 | 1501 | 1516 | 21316 | 21331 | ATAGAGTTGCACCGTT | AₖₛAₖG_{ds}A_{ds}G_{ds}T_{ds}T_{ds}G_{ds}^{m} | 71 | 192 |
| | | | | | | _{ds}G_{ds}G_{ds}G_{ds}^{m}CₖₛTₖₛAₖₛAₑ | | |
| 1340989 | 812 | 827 | 15693 | 15708 | CTTATTGGTAAGTATT | ^{m}CₖₛTₖₛTₖₛA_{ds}T_{ds}T_{ds}G_{ds}G_{ds}T_{ds} | 24 | 1350 |
| | | | | | | A_{ds}A_{ds}G_{ds}TₖₛAₖₛTₖₛTₑ | | |
| 1340992 | 1621 | 1636 | 21436 | 21451 | GAGTCGGTCACCTTTC | GₖₛAₖₛGₖₛT_{ds}^{m}C_{ds}G_{ds}G_{ds}T_{ds}^{m}C_{d} | 74 | 350 |
| | | | | | | ₛA_{ds}^{m}C_{ds}^{m}C_{ds}TₖₛTₖₛTₖₛ^{m}Cₑ | | |
| 1340996 | 1602 | 1617 | 21417 | 21432 | ATGTATCTTATAAGAC | AₖₛTₖₛG_{Ks}T_{ds}A_{ds}^{m}C_{ds}T_{ds}T_{ds} | 24 | 1751 |
| | | | | | | A_{ds}T_{ds}A_{ds}AₖₛGₖₛAₖₛ^{m}Cₑ | | |
| 1340999 | 1617 | 1632 | 21432 | 21447 | CGGTCACCTTTCATAA | ^{m}CₖₛGₖₛGₖₛT_{ds}^{m}C_{ds}A_{ds}^{m}C_{ds}^{m}C_{ds} | 67 | 36 |
| | | | | | | T_{ds}T_{ds}T_{ds}^{m}C_{ds}AₖₛTₖₛAₖₛAₑ | | |
| 1341003 | 1625 | 1640 | 21440 | 21455 | AATAGAGTCGGTCACC | AₖₛAₖₛTₖₛA_{ds}G_{ds}A_{ds}G_{ds}T_{ds}^{m}C_{ds} | 58 | 662 |
| | | | | | | G_{ds}G_{ds}T_{ds}^{m}CₖₛAₖₛ^{m}Cₖₛ^{m}Cₑ | | |
| 1341007 | 1629 | 1644 | 21444 | 21459 | TTAAAATAGAGTCGGT | TₖₛTₖₛAₖₛA_{ds}A_{ds}A_{ds}T_{ds}A_{ds}G_{ds}A | 71 | 973 |
| | | | | | | _{ds}G_{ds}T_{ds}^{m}CₖₛGₖₛGₖₛTₑ | | |
| 1341010 | 1708 | 1723 | 21523 | 21538 | CTCTGGGACCAAGGAT | ^{m}CₖₛTₖₛ^{m}CₖₛT_{ds}G_{ds}G_{ds}G_{ds}A_{ds}^{m}C | 62 | 1908 |
| | | | | | | _{ds}^{m}C_{ds}A_{ds}A_{ds}GₖₛGₖₛAₖₛTₑ | | |
| 1341015 | 1713 | 1728 | 21528 | 21543 | AACATCTCTGGGACCA | AₖₛAₖₛ^{m}CₖₛA_{ds}T_{ds}^{m}C_{ds}T_{ds}^{m}C_{ds}T | 61 | 273 |
| | | | | | | _{ds}G_{ds}G_{ds}G_{ds}Aₖₛ^{m}Cₖₛ^{m}CₖₛAₑ | | |
| 1341021 | 1773 | 1788 | 21588 | 21603 | AATAGCCAGTACAGTT | AₖₛAₖₛTₖₛA_{ds}G_{ds}^{m}C_{ds}^{m}C_{ds}A_{ds}G_{d} | 61 | 118 |
| | | | | | | ₛT_{ds}A_{ds}^{m}C_{ds}AₖₛGₖₛTₖₛTₑ | | |
| 1341022 | 1781 | 1796 | 21596 | 21611 | TCTTATGTAATAGCCA | Tₖₛ^{m}CₖₛTₖₛT_{ds}A_{ds}T_{ds}G_{ds}T_{ds}A_{ds} | 76 | 742 |
| | | | | | | A_{ds}T_{ds}A_{ds}Gₖₛ^{m}Cₖₛ^{m}CₖₛAₑ | | |
| 1341023 | 1766 | 1781 | 21581 | 21596 | AGTACAGTTCCTTTTC | AₖₛGₖₛTₖₛA_{sds}^{m}ₛC_{dss}A_{ds}G_{ds}T_{ds}T_{ds} | 59 | 1597 |
| | | | | | | ^{m}C_{ds}^{m}C_{ds}T_{ds}TₖₛTₖₛTₖₛ^{m}Cₑ | | |
| 1341024 | 1777 | 1792 | 21592 | 21607 | ATGTAATAGCCAGTAC | AₖₛTₖₛGₖₛT_{ds}A_{ds}A_{ds}T_{ds}G_{ds}^{m} | 63 | 430 |
| | | | | | | C_{ds}^{m}C_{ds}A_{ds}GₖₛTₖₛAₖₛ^{m}Cₑ | | |
| 1341034 | 2191 | 2206 | 22006 | 22021 | GTCTTGATGTAGTGGG | GₖₛTₖₛ^{m}CₖₛT_{ds}T_{ds}G_{ds}A_{ds}T_{ds}G_{ds} | 70 | 1132 |
| | | | | | | T_{ds}A_{ds}G_{ds}TₖₛGₖₛGₖₛGₑ | | |
| 1341040 | 1081 | 1096 | 20896 | 20911 | CTGCTAGTGCCAAACC | ^{m}CₖₛTₖₛGₖₛ^{m}C_{ds}T_{ds}A_{ds}G_{ds}T_{ds}G_{ds} | 67 | 1510 |
| | | | | | | ^{m}C_{ds}^{m}C_{ds}A_{ds}AₖₛAₖₛ^{m}Cₖₛ^{m}Cₑ | | |
| 1341045 | 2254 | 2269 | 22069 | 22084 | CAAGAGGATAGTCCAT | ^{m}CₖₛAₖₛAₖₛG_{ds}A_{ds}G_{ds}G_{ds}A_{ds}T_{ds} | 64 | 510 |
| | | | | | | A_{ds}G_{ds}T_{ds}^{m}Cₖₛ^{m}CₖₛAₖₛTₑ | | |
| 1341048 | 2245 | 2260 | 22060 | 22075 | AGTCCATGCAAAAGCA | AₖₛGₖₛTₖₛ^{m}C_{ds}^{m}C_{ds}A_{ds}T_{ds}G_{ds}^{m}C | 80 | 120 |
| | | | | | | _{ds}A_{ds}A_{ds}A_{ds}AₖₛGₖₛ^{m}CₖₛAₑ | | |
| 1341049 | 2355 | 2370 | 22170 | 22185 | TTATAACTACAAGAGG | TₖₛTₖₛAₖₛT_{ds}A_{ds}A_{ds}^{m}C_{ds}T_{ds}A_{ds}^{m} | 43 | 1289 |
| | | | | | | C_{ds}A_{ds}A_{ds}GₖₛAₖₛGₖₛGₑ | | |
| 1341051 | 1077 | 1092 | 20892 | 20907 | TAGTGCCAAACCAATG | TₖₛAₖₛGₖₛT_{ds}G_{ds}^{m}C_{ds}^{m}C_{ds}A_{ds}A_{d} | 61 | 1198 |
| | | | | | | ₛA_{ds}^{m}C_{ds}^{m}C_{ds}AₖₛAₖₛTₖₛ | | |
| 1341059 | N/A | N/A | 9518 | 9533 | CTACACTAATATTGAG | ^{m}CₖₛTₖₛAₖₛ^{m}C_{ds}A_{ds}^{m}C_{ds}T_{ds}A_{ds}A | 10 | 59 |
| | | | | | | _{ds}T_{ds}A_{ds}T_{ds}TₖₛGₖₛAₖₛGₑ | | |
| 1341065 | N/A | N/A | 11853 | 11868 | AGCAGAATTGTGAACG | AₖₛGₖₛ^{m}CₖₛA_{ds}G_{ds}A_{ds}A_{ds}T_{ds}T_{ds} | 56 | 844 |
| | | | | | | G_{ds}T_{ds}G_{ds}AₖₛAₖₛ^{m}CₖₛGₑ | | |
| 1341066 | N/A | N/A | 12423 | 12438 | GGTGGTAACGGTGATC | GₖₛGₖₛTₖₛG_{ds}G_{ds}T_{ds}A_{ds}A_{ds}^{m}C_{ds} | 47 | 2591 |
| | | | | | | G_{ds}G_{ds}T_{ds}GₖₛAₖₛTₖₛ^{m}Cₑ | | |
| 1341072 | N/A | N/A | 15496 | 15511 | CTGCATTAATGCCACC | ^{m}CₖₛTₖₛGₖₛ^{m}C_{ds}A_{ds}T_{ds}T_{ds}A_{ds}A_{ds} | 40 | 1168 |
| | | | | | | T_{ds}G_{ds}^{m}C_{ds}^{m}CₖₛAₖₛ^{m}Cₖₛ^{m}Cₑ | | |
| 1341074 | N/A | N/A | 14197 | 14212 | TTATGTGATTGAGTTC | TₖₛTₖₛAₖₛT_{ds}G_{ds}T_{ds}G_{ds}A_{ds}T_{ds}T_{d} | 30 | 2431 |
| | | | | | | ₛG_{ds}A_{ds}GₖₛTₖₛTₖₛ^{m}Cₑ | | |
| 1341078 | N/A | N/A | 14916 | 14931 | ATACATTAGCAAGCTA | AₖₛTₖₛAₖₛ^{m}C_{ds}A_{ds}T_{ds}T_{ds}A_{ds}G_{ds} | 48 | 309 |
| | | | | | | ^{m}C_{ds}A_{ds}A_{ds}Gₖₛ^{m}CₖₛTₖₛAₑ | | |
| 1341086 | N/A | N/A | 16131 | 16146 | GCTCCATAATAATAGC | Gₖₛ^{m}CₖₛTₖₛ^{m}C_{ds}^{m}C_{ds}A_{ds}T_{ds}A_{ds}A | 8 | 2665 |
| | | | | | | _{ds}T_{ds}A_{ds}A_{ds}TₖₛAₖₛGₖₛ^{m}Cₑ | | |
| 1341091 | N/A | N/A | 17991 | 18006 | GTTAGTATAGTTATCT | GₖₛTₖₛTₖₛA_{ds}G_{ds}T_{ds}A_{ds}T_{ds}A_{ds}G | 71 | 1171 |
| | | | | | | _{ds}T_{ds}T_{ds}AₖₛTₖₛ^{m}CₖₛTₑ | | |
| 1341094 | N/A | N/A | 18097 | 18112 | GAAATTGATACACCAA | GₖₛAₖₛAₖₛA_{ds}T_{ds}T_{ds}G_{ds}A_{ds}T_{ds}A | 64 | 315 |
| | | | | | | _{ds}^{m}C_{ds}A_{ds}^{m}Cₖₛ^{m}CₖₛAₖₛAₑ | | |
| 1341104 | N/A | N/A | 19910 | 19925 | CATCTTAAGATACCCA | ^{m}CₖₛAₖₛTₖₛ^{m}C_{ds}T_{ds}T_{ds}A_{ds}A_{ds}G_{ds} | 76 | 475 |
| | | | | | | A_{ds}T_{ds}A_{ds}^{m}Cₖₛ^{m}Cₖₛ^{m}CₖₛAₑ | | |
| 1341106 | N/A | N/A | 18695 | 18710 | AAAGACTTTGAGACTC | AₖₛAₖₛAₖₛG_{ds}A_{ds}^{m}C_{ds}T_{ds}T_{ds}T_{ds} | 67 | 1250 |
| | | | | | | G_{ds}A_{ds}G_{ds}Aₖₛ^{m}CₖₛTₖₛ^{m}Cₑ | | |
| 1341109 | 1085 | 1100 | 20900 | 20915 | ACTGCTGCTAGTGCCA | Aₖₛ^{m}CₖₛTₖₛG_{ds}^{m}C_{ds}T_{ds}G_{ds}^{m}C_{ds}T | 57 | 1821 |
| | | | | | | _{ds}A_{ds}G_{ds}T_{ds}Gₖₛ^{m}Cₖₛ^{m}CₖₛAₑ | | |
| 1341111 | N/A | N/A | 20116 | 20131 | CAGCATCAAGACATTC | ^{m}CₖₛAₖₛGₖₛ^{m}C_{ds}A_{ds}T_{ds}^{m}C_{ds}A_{ds} | 70 | 2191 |
| | | | | | | A_{ds}G_{ds}A_{ds}^{m}C_{ds}AₖₛTₖₛTₖₛ | | |
| 1341112 | N/A | N/A | 20381 | 20396 | AATCACAAGTAAGGTA | AₖₛAₖₛTₖₛ^{m}C_{ds}A_{ds}^{m}C_{ds}A_{ds}A_{ds}G_{d} | 63 | 1333 |
| | | | | | | ₛT_{ds}A_{ds}A_{ds}GₖₛGₖₛTₖₛAₑ | | |
| 1341117 | N/A | N/A | 20192 | 20207 | GCAGTTATTAGAAGTC | Gₖₛ^{m}CₖₛAₖₛG_{ds}T_{ds}T_{ds}A_{ds}T_{ds}T_{ds} | 67 | 398 |
| | | | | | | A_{ds}G_{ds}A_{ds}AₖₛGₖₛTₖₛ^{m}Cₑ | | |
| 1341124 | N/A | N/A | 12501 | 12516 | GCAGAAATTCACCTTG | Gₖₛ^{m}CₖₛAₖₛG_{ds}A_{ds}A_{ds}A_{ds}T_{ds}T_{ds} | 62 | 1002 |
| | | | | | | ^{m}C_{ds}A_{ds}^{m}C_{ds}^{m}CₖₛTₖₛTₖₛGₑ | | |
| 1341128 | N/A | N/A | 20486 | 20501 | AACTTCATAGTGGACT | AₖₛAₖₛ^{m}CₖₛT_{ds}T_{ds}^{m}C_{ds}A_{ds}T_{ds}A_{ds} | 70 | 2555 |
| | | | | | | G_{ds}T_{ds}G_{ds}GₖₛAₖₛ^{m}CₖₛTₑ | | |
| 1341129 | N/A | N/A | 20422 | 20437 | ACAGTAAAATTATGCC | Aₖₛ^{m}CₖₛAₖₛG_{ds}T_{ds}A_{ds}A_{ds}A_{ds}A_{ds} | 62 | 477 |
| | | | | | | T_{ds}T_{ds}A_{ds}TₖₛGₖₛ^{m}Cₖₛ^{m}Cₑ | | |
| 1341135 | N/A | N/A | 13952 | 13967 | TCTAAGTTAGCCCCCA | Tₖₛ^{m}CₖₛTₖₛA_{ds}A_{ds}G_{ds}T_{ds}T_{ds}A_{ds} | 0 | 928 |
| | | | | | | G_{ds}^{m}C_{ds}^{m}C_{ds}^{m}Cₖₛ^{m}Cₖₛ^{m}CₖₛAₑ | | |
| 1341139 | N/A | N/A | 12799 | 12814 | GCTGTAAGAGTCAGTA | Gₖₛ^{m}CₖₛTₖₛG_{ds}T_{ds}A_{ds}A_{ds}G_{ds}A_{ds} | 52 | 693 |
| | | | | | | G_{ds}T_{ds}^{m}C_{ds}AₖₛGₖₛTₖₛAₑ | | |
| 1341140 | 1180 | 1195 | 20995 | 21010 | GTTTTTAAGAGGCATG | GₖₛTₖₛTₖₛT_{ds}T_{ds}T_{ds}A_{ds}A_{ds}G_{ds}A_{d} | 78 | 1199 |
| | | | | | | ₛG_{ds}G_{ds}^{m}CₖₛAₖₛTₖₛGₑ | | |
| 1341142 | 1257 | 1272 | 21072 | 21087 | AGCTTTTGTCCACCTT | AₖₛGₖₛ^{m}CₖₛT_{ds}T_{ds}T_{ds}T_{ds}G_{ds}T_{ds}^{m} | 69 | 1822 |
| | | | | | | C_{ds}^{m}C_{ds}^{m}CₖₛTₖₛTₖₛ^{m}Cₑ | | |
| 1341151 | 1315 | 1330 | 21130 | 21145 | ACAGTCTTAAACCTTC | Aₖₛ^{m}CₖₛAₖₛG_{ds}T_{ds}^{m}C_{ds}T_{ds}T_{ds}A_{ds} | 73 | 110 |
| | | | | | | A_{ds}A_{ds}^{m}C_{ds}^{m}CₖₛTₖₛTₖₛ^{m}Cₑ | | |
| 1341153 | 1325 | 1340 | 21140 | 21155 | TGCTACTTGAACAGTC | TₖₛCₖₛ^{m}CₖₛT_{ds}A_{ds}^{m}C_{ds}T_{ds}T_{ds}G_{ds} | 68 | 889 |
| | | | | | | A_{ds}A_{ds}^{m}C_{ds}AₖₛGₖₛTₖₛ^{m}Cₑ | | |
| 1341156 | 1311 | 1326 | 21126 | 21141 | TCTTAAACCTTCCCTG | Tₖₛ^{m}CₖₛTₖₛT_{ds}A_{ds}A_{ds}A_{ds}^{m}C_{ds}^{m}C | 38 | 2160 |
| | | | | | | _{ds}T_{ds}T_{ds}^{m}C_{ds}^{m}Cₖₛ^{m}CₖₛTₖₛGₑ | | |
| 1341158 | 700 | 715 | 12118 | 12133 | CAGAGACATGAGGTTT | ^{m}CₖₛAₖₛGₖₛA_{ds}G_{ds}A_{ds}^{m}C_{ds}A_{ds}T_{d} | 45 | 2319 |
| | | | | | | ₛG_{ds}A_{ds}G_{ds}GₖₛTₖₛTₖₛTₑ | | |
| 1341167 | 1321 | 1336 | 21136 | 21151 | ACTTGAACAGTCTTAA | Aₖₛ^{m}CₖₛTₖₛT_{ds}G_{ds}A_{ds}A_{ds}^{m}C_{ds}A_{d} | 60 | 578 |
| | | | | | | ₛG_{ds}T_{ds}^{m}C_{ds}TₖₛTₖₛAₖₛAₑ | | |
| 1341173 | 1331 | 1346 | 21146 | 21161 | TTGGAATGCTACTTGA | TₖₛTₖₛGₖₛG_{ds}A_{ds}A_{ds}T_{ds}G_{ds}^{m}C_{ds} | 56 | 1279 |
| | | | | | | T_{ds}A_{ds}^{m}C_{ds}TₖₛTₖₛGₖₛAₑ | | |
| 1341232 | 1340 | 1355 | 21155 | 21170 | GGCTACAGATTGGAAT | GₖₛGₖₛ^{m}CₖₛT_{ds}A_{ds}^{m}C_{ds}A_{ds}G_{ds}A_{d} | 28 | 1980 |
| | | | | | | ₛT_{ds}T_{ds}G_{ds}GₖₛAₖₛAₖₛTₑ | | |
| 1341255 | 1351 | 1366 | 21166 | 21181 | TTCTGTGGCATGGCTA | TₖₛTₖₛ^{m}CₖₛT_{ds}G_{ds}T_{ds}G_{ds}G_{ds}^{m}C_{ds} | 59 | 812 |
| | | | | | | A_{ds}T_{ds}G_{ds}Gₖₛ^{m}CₖₛTₖₛAₑ | | |
| 1341271 | 1355 | 1370 | 21170 | 21185 | GATATTCTGTGGCATG | GₖₛAₖₛTₖₛA_{ds}T_{ds}T_{ds}^{m}C_{ds}T_{ds}G_{ds} | 71 | 1046 |
| | | | | | | T_{ds}G_{ds}G_{ds}^{m}CₖₛAₖₛTₖₛGₑ | | |
| 1341321 | 1359 | 1374 | 21174 | 21189 | TGTTGATATTCTGTGG | TₖₛGₖₛTₖₛT_{ds}G_{ds}A_{ds}T_{ds}A_{ds}T_{ds}T_{d} | 64 | 1358 |
| | | | | | | ₛ^{m}C_{ds}T_{ds}GₖₛTₖₛGₖₛGₑ | | |
| 1341323 | 798 | 813 | 15679 | 15694 | TTCCATCTATCAGACT | TₖₛTₖₛ^{m}Cₖₛ^{m}C_{ds}A_{ds}T_{ds}^{m}C_{ds}T_{ds}A | 43 | 571 |
| | | | | | | _{ds}T_{ds}^{m}C_{ds}A_{ds}GₖₛAₖₛ^{m}CₖₛTₑ | | |
| 1341427 | 1395 | 1410 | 21210 | 21225 | ACTTGATCTCTTAGCT | Aₖₛ^{m}CₖₛTₖₛT_{ds}G_{ds}A_{ds}T_{ds}^{m}C_{ds}T_{ds} | 59 | 813 |
| | | | | | | ^{m}C_{ds}T_{ds}T_{ds}AₖₛGₖₛ^{m}CₖₛTₑ | | |
| 1341428 | 1387 | 1402 | 21202 | 21217 | TCTTAGCTGTGCACTC | Tₖₛ^{m}CₖₛTₖₛT_{ds}A_{ds}G_{ds}^{m}C_{ds}T_{ds}G_{ds} | 52 | 190 |
| | | | | | | T_{ds}G_{ds}^{m}C_{ds}Aₖₛ^{m}CₖₛTₖₛ^{m}Cₑ | | |
| 1341436 | 1421 | 1436 | 21236 | 21251 | AGGTTGAGATAAAGCT | AₖₛGₖₛGₖₛT_{ds}T_{ds}G_{ds}A_{ds}G_{ds}A_{ds}T | 71 | 1904 |
| | | | | | | _{ds}A_{ds}A_{ds}AₖₛGₖₛ^{m}CₖₛTₑ | | |
| 1341437 | 1431 | 1446 | 21246 | 21261 | AAATATGTCCAGGTTG | AₖₛAₖₛAₖₛT_{ds}A_{ds}T_{ds}G_{ds}T_{ds}^{m}C_{ds} | 74 | 581 |
| | | | | | | ^{m}C_{ds}A_{ds}G_{ds}GₖₛTₖₛTₖₛGₑ | | |
| 1341446 | 1488 | 1503 | 21303 | 21318 | GTTTTGGGCTAATGAA | GₖₛTₖₛTₖₛT_{ds}T_{ds}G_{ds}G_{ds}G_{ds}^{m}C_{ds} | 47 | 1204 |
| | | | | | | T_{ds}A_{ds}A_{ds}TₖₛGₖₛAₖₛAₑ | | |
| 1341447 | 1496 | 1511 | 21311 | 21326 | GTTGCACCGTTTTGGG | GₖₛTₖjₖₛG_{ds}^{m}C_{ds}A_{ds}^{m}C_{ds}^{m}C_{ds}G | 45 | 1827 |
| | | | | | | _{ds}T_{ds}T_{ds}T_{ds}TₖₛGₖₛGₖₛGₑ | | |
| 1341450 | 1726 | 1741 | 21541 | 21556 | CTAAAATTGTCTAAAC | ^{m}CₖₛTₖₛAₖₛA_{ds}A_{ds}A_{ds}T_{ds}T_{ds}G_{ds} | 7 | 2590 |
| | | | | | | T_{ds}^{m}C_{ds}T_{ds}AₖₛAₖₛAₖₛ^{m}Cₑ | | |
| 1341454 | 1022 | 1037 | 20837 | 20852 | CTTTGCAGCATTGATT | ^{m}CₖₛTₖₛTIcₛT_{ds}G_{ds}^{m}c_{ds}A_{ds}G_{ds}^{m}C | 56 | 2463 |
| | | | | | | _{ds}A_{ds}T_{ds}T_{ds}GₖₛAₖₛTₖₛTₑ | | |
| 1341455 | 1717 | 1732 | 21532 | 21547 | TCTAAACATCTCTGGG | Tₖₛ^{m}CₖₛTₖₛA_{ds}A_{ds}A_{ds}^{m}C_{ds}A_{ds}T_{ds} | 42 | 2287 |
| | | | | | | ^{m}C_{ds}T_{ds}^{m}C_{ds}TₖₛGₖₛGₖₛGₑ | | |
| 1341460 | N/A | N/A | 9337 | 9352 | CCTCGATCCTATATAC | ^{m}Cₖₛ^{m}CₖₛTₖₛ^{m}C_{ds}G_{ds}A_{ds}T_{ds}^{m}C_{ds} | 11 | 2812 |
| | | | | | | ^{m}C_{ds}T_{ds}A_{ds}T_{ds}AₖₛTₖₛAₖₛ^{m}Cₑ | | |
| 1341467 | 2184 | 2199 | 21999 | 22014 | TGTAGTGGGAGTCGGA | TₖₛGₖₛTₖₛA_{ds}G_{ds}T_{ds}G_{ds}G_{ds}G_{ds}A | 53 | 587 |
| | | | | | | _{ds}G_{ds}T_{ds}^{m}CₖₛGₖₛGₖₛAₑ | | |
| 1341469 | N/A | N/A | 9971 | 9986 | TTGAGTAGTGTAAGCT | TₖₛTₖₛGₖₛA_{ds}G_{ds}T_{ds}A_{ds}G_{ds}T_{ds}G | 40 | 2346 |
| | | | | | | _{ds}T_{ds}A_{ds}AₖₛGₖₛ^{m}CₖₛTₑ | | |
| 1341476 | N/A | N/A | 11568 | 11583 | TGACAATGGTTGATAG | TₖₛGₖₛAₖₛ^{m}C_{ds}A_{ds}A_{ds}T_{ds}G_{ds}G_{ds} | 38 | 1700 |
| | | | | | | T_{ds}T_{ds}G_{ds}AₖₛTₖₛAₖₛGₑ | | |
| 1341477 | N/A | N/A | 9961 | 9976 | TAAGCTGAGAGTTCTA | TₖₛAₖₛAₖₛG_{ds}^{m}C_{ds}T_{ds}G_{ds}A_{ds}G_{ds} | 48 | 2499 |
| | | | | | | A_{ds}G_{ds}T_{ds}Tₖₛ^{m}CₖₛTₖₛAₑ | | |
| 1341479 | N/A | N/A | 17986 | 18001 | TATAGTTATCTTCTCA | TₖₛAₖₛTₖₛA_{ds}G_{ds}T_{ds}T_{ds}A_{ds}T_{ds}^{m} | 59 | 2295 |
| | | | | | | C_{ds}T_{ds}T_{ds}^{m}CₖₛTₖₛ^{m}CₖₛAₑ | | |
| 1341481 | N/A | N/A | 17996 | 18011 | ATGAAGTTAGTATAGT | AₖₛTₖₛGₖₛA_{ds}A_{ds}G_{ds}T_{ds}T_{ds}A_{ds}G | 61 | 1483 |
| | | | | | | _{ds}T_{ds}A_{ds}TₖₛAₖₛGₖₛTₑ | | |
| 1341483 | N/A | N/A | 16282 | 16297 | TAGTCTTCAGCAAAGT | TₖₛAₖₛGrₖₛT_{ds}^{m}C_{ds}T_{ds}T_{ds}^{m}C_{ds}A_{ds} | 36 | 2632 |
| | | | | | | G_{ds}^{m}C_{ds}A_{ds}AₖₛAₖₛGₖₛTₑ | | |
| 1341484 | N/A | N/A | 16377 | 16392 | ACCAAACTTCCAGCAG | Aₖₛ^{m}Cₖₛ^{m}CₖₛA_{ds}A_{ds}A_{ds}^{m}C_{ds}T_{ds}T | 36 | 1948 |
| | | | | | | _{ds}^{m}C_{ds}^{m}C_{ds}A_{ds}Gₖₛ^{m}CₖₛAₖₛGₑ | | |
| 1341493 | N/A | N/A | 19914 | 19929 | AGTGCATCTTAAGATA | AₖₛGₖₛTₖₛG_{ds}^{m}C_{ds}A_{ds}T_{ds}^{m}C_{ds}T_{ds} | 12 | 2130 |
| | | | | | | T_{ds}A_{ds}A_{ds}GₖₛAₖₛTₖₛAₑ | | |
| 1341505 | N/A | N/A | 19906 | 19921 | TTAAGATACCCAGGTT | TₖₛTₖₛAₖₛA_{ds}G_{ds}A_{ds}T_{ds}A_{ds}^{m}C_{ds} | 51 | 163 |
| | | | | | | ^{m}C_{ds}^{m}C_{ds}A_{ds}GₖₛGₖₛTₖₛTₑ | | |
| 1341507 | N/A | N/A | 20009 | 20024 | AGAGAGTAATCAGTTT | AₖₛGₖₛAₖₛG_{ds}A_{ds}G_{ds}T_{ds}A_{ds}A_{ds}T | 51 | 2651 |
| | | | | | | _{ds}^{m}C_{ds}A_{ds}GₖₛTₖₛTₖₛTₑ | | |
| 1341509 | N/A | N/A | 14165 | 14180 | GCAAGCCAACAGAGAG | Gₖₛ^{m}CₖₛAₖₛA_{ds}G_{ds}^{m}C_{ds}^{m}C_{ds}A_{ds} | 38 | 2556 |
| | | | | | | A_{ds}^{m}C_{ds}A_{ds}G_{ds}AₖₛGₖₛAₖₛGₑ | | |
| 1341511 | N/A | N/A | 14175 | 14190 | GCCTTGAATAGCAAGC | Gₖₛ^{m}Cₖₛ^{m}CₖₛT_{ds}T_{ds}G_{ds}A_{ds}A_{ds}T_{ds} | 38 | 2063 |
| | | | | | | A_{ds}G_{ds}^{m}C_{ds}AₖₛAₖₛGₖₛ^{m}Cₑ | | |

TABLE 46
Inhibition of HSD17B13 RNA by modified oligonucleotides targeting SEQ ID NO.: 1, and 2

| | SEQ ID | SEQ ID | SEQ ID | SEQ ID | | | | |
|---|---|---|---|---|---|---|---|---|
| | NO: 1 | NO: 1 | NO: 2 | NO: 2 | | | | |
| Compound | Start | Stop | Start | Stop | | Chemistry Notation | % | SEQ ID |
| Number | Site | Site | Site | Site | Sequence (5′ to 3′) | (5′ to 3′) | inhibition | NO |
| 1245927 | N/A | N/A | 3433 | 3448 | AGTAGATGGTAAGTCA | AₖₛGₖₛTₖₛA_{ds}G_{ds}A_{ds}T_{ds}G_{ds}G_{ds} | 79 | 121 |
| | | | | | | T_{ds}A_{ds}A_{ds}G_{ds}Tₖₛ^{m}CₖₛAₖ | | |
| 1246023 | N/A | N/A | 5046 | 5061 | GAGTGAATCATTCAGT | GₖₛAₖₛGₖₛT_{ds}G_{ds}A_{ds}A_{ds}T_{ds}^{m}C_{ds} | 87 | 1526 |
| | | | | | | A_{ds}T_{ds}T_{ds}^{m}C_{ds}AₖₛGₖₛTₖ | | |
| 1341648 | 1251 | 1266 | 21066 | 21081 | TGTCCACCTTTAAATG | TₖₛG_{kS}Tₖₛ^{m}C_{ds}C_{ys}A_{ds}^{m}C_{ds}^{m}C_{ds} | 17 | 1666 |
| | | | | | | T_{ds}T_{ds}T_{ds}A_{ds}A_{ds}AₖₛTₖₛGₖ | | |
| 1341654 | 1317 | 1332 | 21132 | 21147 | GAACAGTCTTAAACCT | GₖₛAₖₛAₖₛ^{m}C_{ds}A_{ys}G_{ds}T_{ds}^{m}C_{ds} | 75 | 266 |
| | | | | | | T_{ds}T_{ds}A_{ds}A_{ds}A_{ds}^{m}Cₖₛ^{m}CₖₛTₖ | | |
| 1341658 | 1313 | 1328 | 21128 | 21143 | AGTCUTAAACCTTCCC | AₖₛGₖₛTₖₛ^{m}C_{ds}U_{ys}T_{ds}A_{ds}A_{ds}A_{ds} | 52 | 2813 |
| | | | | | | ^{m}C_{ds}^{m}C_{ds}T_{ds}T_{ds}^{m}Cₖₛ^{m}Cₖₛ^{m}Cₖ | | |
| 1341661 | 1321 | 1336 | 21136 | 21151 | ACTTGAACAGTCTTAA | Aₖₛ^{m}CₖₛTₖₛT_{ds}G_{ys}A_{ds}A_{ds}^{m}C_{ds} | 29 | 578 |
| | | | | | | A_{ds}G_{ds}T_{ds}^{m}C_{ds}T_{ds}TₖₛAₖₛAₖ | | |
| 1341663 | 1308 | 1323 | 21123 | 21138 | TAAACCTTCCCTGTGT | TₖₛAₖₛAₖₛA_{ds}C_{ys}^{m}C_{ds}T_{ds}T_{ds}^{m}C_{ds} | 46 | 1745 |
| | | | | | | ^{m}C_{ds}^{m}C_{ds}T_{ds}G_{ds}TₖₛGₖₛTₖ | | |
| 1341668 | 1335 | 1350 | 21150 | 21165 | CAGAUTGGAATGCTAC | ^{m}CₖₛAₖₛGₖₛA_{ds}U_{ys}T_{ds}G_{ds}G_{ds}A_{ds} | 70 | 2814 |
| | | | | | | A_{ds}T_{ds}G_{ds}^{m}C_{ds}TₖₛAₖₛ^{m}Cₖ | | |
| 1341672 | 1329 | 1344 | 21144 | 21159 | GGAAUGCTACTTGAAC | GₖₛGₖₛAₖₛA_{ds}U_{ys}G_{ds}^{m}C_{ds}T_{ds} | 62 | 2815 |
| | | | | | | A_{ds}^{m}C_{ds}T_{ds}T_{ds}G_{ds}AₖₛAₖₛ^{m}Cₖ | | |
| 1341677 | 1325 | 1340 | 21140 | 21155 | TGCTACTTGAACAGTC | TₖₛGₖₛ^{m}CₖₛT_{ds}A_{ys}^{m}C_{ds}T_{ds}T_{ds} | 65 | 889 |
| | | | | | | G_{ds}A_{ds}A_{ds}^{m}C_{ds}A_{ds}GₖₛTₖₛ^{m}Cₖ | | |
| 1341685 | 1342 | 1357 | 21157 | 21172 | ATGGCTACAGATTGGA | AₖₛTₖₛGₖₛG_{ds}C_{ys}T_{ds}A_{ds}^{m}C_{ds}A_{ds} | 44 | 111 |
| | | | | | | G_{ds}A_{ds}T_{ds}T_{ds}GₖₛGₖₛAₖ | | |
| 1341691 | 1357 | 1372 | 21172 | 21187 | TTGAUATTCTGTGGCA | TₖₛTₖₛGₖₛA_{ds}U_{ys}A_{ds}T_{ds}T_{ds}^{m}C_{ds} | 60 | 2816 |
| | | | | | | T_{ds}G_{ds}T_{ds}G_{ds}Gₖₛ^{m}CₖₛAₖ | | |
| 1341692 | 1348 | 1363 | 21163 | 21178 | TGTGGCATGGCTACAG | TₖₛGₖₛTₖₛG_{ds}G_{ys}^{m}C_{ds}A_{ds}T_{ds}G_{ds} | 5 | 579 |
| | | | | | | G_{ds}^{m}C_{ds}T_{ds}A_{ds}^{m}CₖₛAₖₛGₖ | | |
| 1341697 | 1353 | 1368 | 21168 | 21183 | TATTCTGTGGCATGGC | TₖₛAₖₛTₖₛT_{ds}C_{ys}T_{ds}G_{ds}T_{ds}G_{ds} | 55 | 890 |
| | | | | | | G_{ds}^{m}C_{ds}A_{ds}T_{ds}GₖₛGₖₛ^{m}Cₖ | | |
| 1341698 | 1366 | 1381 | 21181 | 21196 | GTGTUCTTGTTGATAT | GₖₛTₖₛGₖₛT_{ds}U_{ys}^{m}C_{ds}T_{ds}T_{ds}G_{ds} | 52 | 2817 |
| | | | | | | T_{ds}T_{ds}G_{ds}A_{ds}TₖₛAₖₛTₖ | | |
| 1341702 | 1394 | 1409 | 21209 | 21224 | CTTGATCTCTTAGCTG | ^{m}CₖₛTₖₛTₖₛG_{ds}A_{ys}T_{ds}^{m}C_{ds}T_{ds} | 32 | 736 |
| | | | | | | ^{m}C_{ds}T_{ds}T_{ds}A_{ds}G_{ds}^{m}CₖₛTₖₛGₖ | | |
| 1341703 | 1388 | 1403 | 21203 | 21218 | CTCTUAGCTGTGCACT | ^{m}CₖₛTₖₛ^{m}CₖₛT_{ds}U_{ys}A_{ds}G_{ds}^{m}C_{ds} | 67 | 2818 |
| | | | | | | T_{ds}G_{ds}T_{ds}G_{ds}^{m}C_{ds}Aₖₛ^{m}CₖₛTₖ | | |
| 1341713 | 1421 | 1436 | 21236 | 21251 | AGGTUGAGATAAAGCT | AₖₛGₖₛGₖₛT_{ds}U_{ys}G_{ds}A_{ds}G_{ds}A_{ds} | 58 | 2819 |
| | | | | | | T_{ds}A_{ds}A_{ds}A_{ds}Gₖₛ^{m}CₖₛTₖ | | |
| 1341716 | 696 | 711 | 12114 | 12129 | GACAUGAGGTTTTGAT | GₖₛAₖₛ^{m}CₖₛA_{ds}U_{ys}G_{ds}A_{ds}G_{ds} | 34 | 2820 |
| | | | | | | G_{ds}T_{ds}T_{ds}T_{ds}T_{ds}GₖₛAₖₛTₖ | | |
| 1341719 | 1416 | 1431 | 21231 | 21246 | GAGAUAAAGCTGCCTG | GₖₛAₖₛGₖₛA_{ds}U_{ys}A_{ds}A_{ds}A_{ds}G_{ds} | 39 | 2821 |
| | | | | | | ^{m}C_{ds}T_{ds}G_{ds}^{m}C_{ds}^{m}CₖₛTₖₛGₖ | | |
| 1341726 | 1426 | 1441 | 21241 | 21256 | TGTCCAGGTTGAGATA | TₖₛGₖₛTₖₛ^{m}C_{ds}C_{ys}A_{ds}G_{ds}G_{ds}T_{ds} | 41 | 191 |
| | | | | | | T_{ds}G_{ds}A_{ds}G_{ds}AₖₛTₖₛAₖ | | |
| 1341727 | 1464 | 1479 | 21279 | 21294 | AGGCUAGGGAAATCTT | AₖₛGₖₛGₖₛ^{m}C_{ds}U_{ys}A_{ds}G_{ds}G_{ds} | 41 | 2822 |
| | | | | | | G_{ds}A_{ds}A_{ds}A_{ds}T_{ds}^{m}CₖₛTₖₛTₖ | | |
| 1341729 | 1494 | 1509 | 21309 | 21324 | TGCACCGTTTTGGGCT | TₖₛGₖₛ^{m}CₖₛA_{ds}C_{ys}^{m}C_{ds}G_{ds}T_{ds} | 55 | 1671 |
| | | | | | | T_{ds}T_{ds}T_{ds}G_{ds}G_{ds}Gₖₛ^{m}CₖₛTₖ | | |
| 1341734 | 1490 | 1505 | 21305 | 21320 | CCGTUTTGGGCTAATG | ^{m}Cₖₛ^{m}CₖₛGₖₛT_{ds}U_{ys}T_{ds}T_{ds}G_{ds} | 51 | 2823 |
| | | | | | | G_{ds}G_{ds}^{m}C_{ds}T_{ds}A_{ds}AₖₛTₖₛGₖ | | |
| 1341739 | 1623 | 1638 | 21438 | 21453 | TAGAGTCGGTCACCTT | TₖₛAₖₛGₖₛA_{ds}G_{ys}T_{ds}^{m}C_{ds}G_{ds}G_{ds} | 55 | 506 |
| | | | | | | T_{ds}^{m}C_{ds}A_{ds}^{m}C_{ds}^{m}CₖₛTₖₛTₖ | | |
| 1341743 | 1598 | 1613 | 21413 | 21428 | ATCTUATAAGACTATA | AₖₛTₖₛ^{m}CₖₛT_{ds}U_{ys}A_{ds}T_{ds}A_{ds}A_{ds} | 35 | 2824 |
| | | | | | | G_{ds}A_{ds}^{m}C_{ds}T_{ds}AₖₛTₖₛAₖ | | |
| 1341745 | 1498 | 1513 | 21313 | 21328 | GAGTUGCACCGTTTTG | GₖₛAₖₛGₖₛT_{ds}U_{ys}G_{ds}^{m}C_{ds}A_{ds} | 63 | 2825 |
| | | | | | | ^{m}C_{ds}^{m}C_{ds}G_{ds}T_{ds}T_{ds}TₖₛTₖₛGₖ | | |
| 1341753 | 1615 | 1630 | 21430 | 21445 | GTCACCTTTCATAATG | GₖₛTₖₛ^{m}CₖₛA_{ds}C_{ys}^{m}C_{ds}T_{ds}T_{ds} | 40 | 1907 |
| | | | | | | T_{ds}^{m}C_{ds}A_{ds}T_{ds}A_{ds}AₖₛTₖₛGₖ | | |
| 1341755 | 1619 | 1634 | 21434 | 21449 | GTCGGTCACCTTTCAT | GₖₛTₖₛ^{m}CₖₛG_{ds}G_{ys}T_{ds}^{m}C_{ds}A_{ds} | 66 | 194 |
| | | | | | | ^{m}C_{ds}^{m}C_{ds}T_{ds}T_{ds}T_{ds}^{m}CₖₛAₖₛTₖ | | |
| 1341758 | 1627 | 1642 | 21442 | 21457 | AAAAUAGAGTCGGTCA | AₖₛAₖₛAₖₛA_{ds}U_{ys}A_{ds}G_{ds}A_{ds}G_{ds} | 62 | 2826 |
| | | | | | | T_{ds}^{m}C_{ds}G_{ds}G_{ds}Tₖₛ^{m}CₖₛAₖ | | |
| 1341759 | 1711 | 1726 | 21526 | 21541 | CATCUCTGGGACCAAG | ^{m}CₖₛAₖₛTₖₛ^{m}C_{ds}U_{ys}^{m}C_{ds}T_{ds}G_{ds} | 42 | 2827 |
| | | | | | | G_{ds}G_{ds}A_{ds}^{m}C_{ds}^{m}C_{ds}AₖₛAₖₛGₖ | | |
| 1341763 | 1715 | 1730 | 21530 | 21545 | TAAACATCTCTGGGAC | TₖₛAₖₛAₖₛA_{ds}C_{ys}A_{ds}T_{ds}^{m}C_{ds}T_{ds} | 49 | 351 |
| | | | | | | ^{m}C_{ds}T_{ds}G_{ds}G_{ds}GₖₛAₖₛ^{m}Tₖ | | |
| 1341774 | 1705 | 1720 | 21520 | 21535 | TGGGACCAAGGATATA | TₖₛGₖₛGₖₛG_{ds}A_{ys}^{m}C_{ds}^{m}C_{ds}A_{ds} | 51 | 1674 |
| | | | | | | A_{ds}G_{ds}G_{ds}A_{ds}T_{ds}AₖₛTₖₛAₖ | | |
| 1341777 | 796 | 811 | 15677 | 15692 | CCATCTATCAGACTTC | ^{m}Cₖₛ^{m}CₖₛAₖₛT_{ds}C_{ys}T_{ds}A_{ds}T_{ds} | 56 | 415 |
| | | | | | | ^{m}C_{ds}A_{ds}G_{ds}A_{ds}^{m}C_{ds}TₖₛTₖₛ^{m}Cₖ | | |
| 1341780 | 1770 | 1785 | 21585 | 21600 | AGCCAGTACAGTTCCT | AₖₛGₖₛ^{m}Cₖₛ^{m}C_{ds}A_{ys}G_{ds}T_{ds}A_{ds} | 65 | 1909 |
| | | | | | | ^{m}C_{ds}A_{ds}G_{ds}T_{ds}T_{ds}^{m}Cₖₛ^{m}CₖₛTₖ | | |
| 1341785 | 1751 | 1766 | 21566 | 21581 | CCTGUGTTAGCTTTAA | ^{m}Cₖₛ^{m}CₖₛTₖₛG_{ds}U_{ys}G_{ds}T_{ds}T_{ds} | 28 | 2828 |
| | | | | | | A_{ds}G_{ds}^{m}C_{ds}T_{ds}T_{ds}TₖₛAₖₛAₖ | | |
| 1341786 | 1719 | 1734 | 21534 | 21549 | TGTCUAAACATCTCTG | TₖₛGₖₛTₖₛ^{m}C_{ds}U_{ys}A_{ds}A_{ds}A_{ds} | 44 | 2829 |
| | | | | | | ^{m}C_{ds}A_{ds}T_{ds}^{m}C_{ds}T_{ds}^{m}CₖₛTₖₛGₖ | | |
| 1341788 | 1783 | 1798 | 21598 | 21613 | TTTCUTATGTAATAGC | TₖₛTₖₛTₖₛ^{m}C_{ds}U_{ys}T_{ds}A_{ds}T_{ds}G_{ds} | 50 | 2830 |
| | | | | | | T_{ds}A_{ds}A_{ds}T_{ds}AₖₛGₖₛ^{m}Cₖ | | |
| 1341793 | 1775 | 1790 | 21590 | 21605 | GTAAUAGCCAGTACAG | GₖₛTₖₛAₖₛA_{ds}U_{ys}A_{ds}G_{ds}^{m}C_{ds} | 62 | 2831 |
| | | | | | | ^{m}C_{ds}A_{ds}G_{ds}T_{ds}A_{ds}^{m}CₖₛAₖₛGₖ | | |
| 1341796 | 1779 | 1794 | 21594 | 21609 | TTATGTAATAGCCAGT | TₖₛTₖₛAₖₛT_{ds}G_{ys}T_{ds}A_{ds}A_{ds}T_{ds} | 56 | 586 |
| | | | | | | A_{ds}G_{ds}^{m}C_{ds}^{m}C_{ds}AₖₛGₖₛTₖ | | |
| 1341800 | 2187 | 2202 | 22002 | 22017 | TGATGTAGTGGGAGTC | TₖₛGₖₛAₖₛT_{ds}G_{ys}T_{ds}A_{ds}G_{ds}T_{ds} | 43 | 820 |
| | | | | | | G_{ds}G_{ds}G_{ds}A_{ds}GₖₛTₖₛ^{m}Cₖ | | |
| 1341805 | 2194 | 2209 | 22009 | 22024 | TTAGUCTTGATGTAGT | TₖₛTₖₛAₖₛG_{ds}U_{ys}^{m}C_{ds}T_{ds}T_{ds}G_{ds} | 50 | 2832 |
| | | | | | | A_{ds}T_{ds}G_{ds}T_{ds}AₖₛGₖₛTₖ | | |
| 1341809 | 2350 | 2365 | 22165 | 22180 | ACTACAAGAGGTTATT | Aₖₛ^{m}CₖₛTₖₛA_{ds}C_{ys}A_{ds}A_{ds}G_{ds}A_{ds} | 29 | 899 |
| | | | | | | G_{ds}G_{ds}T_{ds}T_{ds}AₖₛTₖₛTₖ | | |
| 1341810 | 2250 | 2265 | 22065 | 22080 | AGGAUAGTCCATGCAA | AₖₛGₖₛGₖₛA_{ds}U_{ys}A_{ds}G_{ds}T_{ds} | 55 | 2833 |
| | | | | | | ^{m}C_{ds}^{m}C_{ds}A_{ds}T_{ds}G_{ds}^{m}CₖₛAₖₛAₖ | | |
| 1341822 | N/A | N/A | 9514 | 9529 | ACTAATATTGAGGCAC | Aₖₛ^{m}CₖₛTₖₛA_{ds}A_{ys}T_{ds}A_{ds}T_{ds}T_{ds} | 42 | 1772 |
| | | | | | | G_{ds}A_{ds}G_{ds}G_{ds}^{m}CₖₛAₖₛ^{m}Cₖ | | |
| 1341825 | N/A | N/A | 9332 | 9347 | ATCCUATATACATCCA | AₖₛTₖₛ^{m}Cₖₛ^{m}C_{ds}U_{ys}A_{ds}T_{ds}A_{ds} | 64 | 2834 |
| | | | | | | T_{ds}A_{ds}^{m}C_{ds}A_{ds}T_{ds}^{m}Cₖₛ^{m}CₖₛAₖ | | |
| 1341828 | N/A | N/A | 9601 | 9616 | CATAUGTGAAGAGCTG | ^{m}CₖₛAₖₛTₖₛA_{ds}U_{ys}G_{ds}T_{ds}G_{ds}A_{ds} | 39 | 2835 |
| | | | | | | A_{ds}G_{ds}A_{ds}G_{ds}^{m}CₖₛTₖₛGₖ | | |
| 1341831 | N/A | N/A | 11578 | 11593 | GTTAUTCTCTTGACAA | GₖₛTₖₛTₖₛA_{ds}U_{ys}T_{ds}^{m}C_{ds}T_{ds}^{m}C_{ds} | 29 | 2836 |
| | | | | | | T_{ds}T_{ds}G_{ds}A_{ds}^{m}CₖₛAₖₛAₖ | | |
| 1341833 | N/A | N/A | 9966 | 9981 | TAGTGTAAGCTGAGAG | TₖₛAₖₛGₖₛT_{ds}G_{ys}T_{ds}A_{ds}A_{ds}G_{ds} | 31 | 1852 |
| | | | | | | ^{m}C_{ds}T_{ds}G_{ds}A_{ds}GₖₛAₖₛGₖ | | |
| 1341836 | 808 | 823 | 15689 | 15704 | TTGGUAAGTATTCCAT | TₖₛTₖₛGₖₛG_{ds}U_{ys}A_{ds}A_{ds}G_{ds}T_{ds} | 13 | 2837 |
| | | | | | | A_{ds}T_{ds}T_{ds}^{m}C_{ds}^{m}CₖₛAₖₛTₖ | | |
| 1341839 | N/A | N/A | 11546 | 11561 | TCTTGACAATGGTTGC | Tₖₛ^{m}CₖₛTₖₛT_{ds}G_{ys}A_{ds}^{m}C_{ds}A_{ds}A_{ds} | 67 | 2199 |
| | | | | | | T_{ds}G_{ds}G_{ds}T_{ds}TₖₛGₖₛ^{m}Cₖ | | |
| 1341850 | N/A | N/A | 14197 | 14212 | TTATGTGATTGAGTTC | TₖₛTₖₛAₖₛT_{ds}G_{ys}T_{ds}G_{ds}A_{ds}T_{ds}T_{ds} | 35 | 2431 |
| | | | | | | G_{ds}A_{ds}G_{ds}TₖₛTₖₛ^{m}Cₖ | | |
| 1341856 | N/A | N/A | 12419 | 12434 | GTAACGGTGATCAAAT | GₖₛTₖₛAₖₛA_{ds}C_{ys}G_{ds}G_{ds}T_{ds}G_{ds} | 21 | 2345 |
| | | | | | | A_{ds}T_{ds}^{m}C_{ds}A_{ds}AₖₛAₖₛTₖ | | |
| 1341863 | N/A | N/A | 15496 | 15511 | CTGCATTAATGCCACC | ^{m}CₖₛTₖₛGₖₛ^{m}C_{ds}A_{ys}T_{ds}T_{ds}A_{ds}A_{ds} | 52 | 1168 |
| | | | | | | T_{ds}G_{ds}^{m}C_{ds}^{m}C_{ds}Aₖₛ^{m}Cₖₛ^{m}Cₖ | | |
| 1341864 | 1017 | 1032 | 20832 | 20847 | CAGCATTGATTCGAAA | ^{m}CₖₛAₖₛGₖₛ^{m}C_{ds}A_{ys}T_{ds}T_{ds}G_{ds} | 37 | 263 |
| | | | | | | A_{ds}T_{ds}T_{ds}^{m}C_{ds}G_{ds}AₖₛAₖₛAₖ | | |
| 1341867 | N/A | N/A | 14916 | 14931 | ATACATTAGCAAGCTA | AₖₛTₖₛAₖₛ^{m}C_{ds}A_{ys}T_{ds}T_{ds}A_{ds}G_{ds} | 36 | 309 |
| | | | | | | ^{m}C_{ds}A_{ds}A_{ds}G_{ds}^{m}CₖₛTₖₛAₖ | | |
| 1341871 | N/A | N/A | 16289 | 16304 | GTTAGAATAGTCTTCA | GₖₛTₖₛTₖₛA_{ds}G_{ys}A_{ds}A_{ds}T_{ds}A_{ds} | 42 | 1481 |
| | | | | | | G_{ds}T_{ds}T_{ds}T_{ds}TₖₛTₖₛAₖ | | |
| 1341873 | N/A | N/A | 16218 | 16233 | TATAGACTGGGTAGGA | TₖₛAₖₛTₖₛA_{ds}G_{ys}A_{ds}^{m}C_{ds}T_{ds}G_{ds} | 30 | 2808 |
| | | | | | | G_{ds}G_{ds}T_{ds}A_{ds}GₖₛGₖₛAₖ | | |
| 1341876 | N/A | N/A | 16127 | 16142 | CATAATAATAGCTCTA | ^{m}CₖₛAₖₛTₖₛA_{ds}A_{ys}T_{ds}A_{ds}A_{ds}T_{ds} | 33 | 2511 |
| | | | | | | A_{ds}G_{ds}^{m}C_{ds}T_{ds}^{m}CₖₛTₖₛAₖ | | |
| 1341878 | N/A | N/A | 16382 | 16397 | TCCCAACCAAACTTCC | Tₖₛ^{m}Cₖₛ^{m}Cₖₛ^{m}C_{ds}A_{ys}A_{ds}^{m}C_{ds} | 43 | 2026 |
| | | | | | | ^{m}C_{ds}A_{ds}A_{ds}A_{ds}^{m}C_{ds}T_{ds}Tₖₛ^{m}Cₖₛ^{m}Cₖ | | |
| 1341885 | N/A | N/A | 17994 | 18009 | GAAGUTAGTATAGTTA | GₖₛAₖₛAₖₛG_{ds}U_{ys}T_{ds}A_{ds}G_{ds}T_{ds} | 43 | 2838 |
| | | | | | | A_{ds}T_{ds}A_{ds}G_{ds}TₖₛTₖₛAₖ | | |
| 1341892 | 1083 | 1098 | 20898 | 20913 | TGCTGCTAGTGCCAAA | TₖₛGₖₛ^{m}CₖₛT_{ds}G_{ys}^{m}C_{ds}T_{ds}A_{ds} | 50 | 1665 |
| | | | | | | G_{ds}T_{ds}G_{ds}^{m}C_{ds}^{m}C_{ds}AₖₛAₖₛAₖ | | |
| 1341893 | N/A | N/A | 17989 | 18004 | TAGTATAGTTATCTTC | TₖₛAₖₛGₖₛT_{ds}A_{ys}T_{ds}A_{ds}G_{ds}T_{ds} | 13 | 1093 |
| | | | | | | T_{ds}A_{ds}T_{ds}^{m}C_{ds}TₖₛTₖₛ^{m}Cₖ | | |
| 1341898 | N/A | N/A | 19912 | 19927 | TGCAUCTTAAGATACC | TₖₛGₖₛ^{m}CₖₛA_{ds}U_{ys}^{m}C_{ds}T_{ds}T_{ds} | 51 | 2839 |
| | | | | | | A_{ds}A_{ds}G_{ds}A_{ds}T_{ds}Aₖₛ^{m}Cₖₛ^{m}Cₖ | | |
| 1341903 | N/A | N/A | 18690 | 18705 | CTTTGAGACTCTTGTT | ^{m}CₖₛTₖₛTₖₛT_{ds}G_{ys}A_{ds}G_{ds}A_{ds} | 15 | 2583 |
| | | | | | | ^{m}C_{ds}T_{ds}^{m}C_{ds}T_{ds}T_{ds}GₖₛTₖₛTₖ | | |
| 1341905 | N/A | N/A | 18092 | 18107 | TGATACACCAATGCAG | TₖₛGₖₛAₖₛT_{ds}A_{ys}^{m}CdsA_{ds}^{m}C_{ds} | 38 | 2370 |
| | | | | | | ^{m}C_{ds}A_{ds}A_{ds}T_{ds}G_{ds}^{m}CₖₛAₖₛGₖ | | |
| 1341910 | N/A | N/A | 19904 | 19919 | AAGAUACCCAGGTTGC | AₖₛAₖₛGₖₛA_{ds}U_{ys}A_{ds}^{m}C_{ds}^{m}C_{ds} | 37 | 2840 |
| | | | | | | ^{m}C_{ds}A_{ds}G_{ds}G_{ds}T_{ds}TₖₛGₖₛ^{m}Cₖ | | |
| 1341913 | 608 | 623 | N/A | N/A | ACAAUATGGGATGAGG | Aₖₛ^{m}CₖₛAₖₛA_{ds}U_{ys}A_{ds}T_{ds}G_{ds} | 70 | 2841 |
| | | | | | | G_{ds}G_{ds}A_{ds}T_{ds}G_{ds}AₖₛGₖₛGₖ | | |
| 1341916 | N/A | N/A | 19908 | 19923 | TCTTAAGATACCCAGG | Tₖₛ^{m}CₖₛTₖₛT_{ds}A_{ys}A_{ds}G_{ds}A_{ds}T_{ds} | 51 | 319 |
| | | | | | | A_{ds}^{m}C_{ds}^{m}C_{ds}^{m}C_{ds}AₖₛGₖₛGₖ | | |
| 1341918 | N/A | N/A | 19916 | 19931 | GGAGUGCATCTTAAGA | GₖₛGₖₛAₖₛG_{ds}U_{ys}G_{ds}^{m}C_{ds}A_{ds} | 32 | 2842 |
| | | | | | | T_{ds}^{m}C_{ds}T_{ds}T_{ds}A_{ds}AₖₛGₖₛAₖ | | |
| 1341920 | N/A | N/A | 20112 | 20127 | ATCAAGACATTCTAGC | AₖₛTₖₛ^{m}CₖₛAₖₛA_{ys}G_{ds}A_{ds}^{m}C_{ds} | 37 | 1488 |
| | | | | | | A_{ds}T_{ds}T_{ds}^{m}C_{ds}T_{ds}AₖₛGₖₛ^{m}Cₖ | | |
| 1341927 | 1079 | 1094 | 20894 | 20909 | GCTAGTGCCAAACCAA | Gₖₛ^{m}CₖₛTₖₛA_{ds}G_{ys}T_{ds}G_{ds}^{m}C_{ds} | 65 | 1354 |
| | | | | | | ^{m}C_{ds}A_{ds}A_{ds}A_{ds}^{m}C_{ds}^{m}CₖₛAₖₛAₖ | | |
| 1341929 | N/A | N/A | 20385 | 20400 | TAGTAATCACAAGTAA | TₖₛAₖₛGₖₛT_{ds}A_{ys}A_{ds}T_{ds}^{m}C_{ds}A_{ds} | 38 | 1489 |
| | | | | | | ^{m}C_{ds}A_{ds}A_{ds}G_{ds}TₖₛAₖₛAₖ | | |
| 1341931 | N/A | N/A | 20197 | 20212 | ACATUGCAGTTATTAG | Aₖₛ^{m}CₖₛAₖₛT_{ds}U_{ys}G_{ds}^{m}C_{ds}A_{ds} | 26 | 2843 |
| | | | | | | G_{ds}T_{ds}T_{ds}A_{ds}T_{ds}TₖₛAₖₛGₖ | | |
| 1341936 | N/A | N/A | 20187 | 20202 | TATTAGAAGTCAGCCC | TₖₛAₖₛTₖₛT_{ds}A_{ys}G_{ds}A_{ds}A_{ds}G_{ds} | 29 | 164 |
| | | | | | | T_{ds}^{m}C_{ds}A_{ds}G_{ds}^{m}Cₖₛ^{m}Cₖₛ^{m}Cₖ | | |
| 1341940 | N/A | N/A | 20482 | 20497 | TCATAGTGGACTTCAT | Tₖₛ^{m}CₖₛAₖₛT_{ds}A_{ys}G_{ds}T_{ds}G_{ds}G_{ds} | 44 | 633 |
| | | | | | | A_{ds}^{m}C_{ds}T_{ds}T_{ds}^{m}CₖₛAₖₛTₖ | | |
| 1341946 | 1075 | 1090 | 20890 | 20905 | GTGCCAAACCAATGTT | GₖₛTₖₛGₖₛ^{m}C_{ds}C_{ys}A_{ds}A_{ds}A_{ds} | 30 | 1042 |
| | | | | | | ^{m}C_{ds}^{m}C_{ds}A_{ds}A_{ds}T_{ds}GₖₛTₖₛTₖ | | |
| 1341951 | N/A | N/A | 12801 | 12816 | AGGCUGTAAGAGTCAG | AₖₛGₖₛGₖₛ^{m}C_{ds}U_{ys}G_{ds}T_{ds}A_{ds} | 52 | 2844 |
| | | | | | | A_{ds}G_{ds}A_{ds}G_{ds}T_{ds}^{m}CₖₛAₖₛGₖ | | |
| 1341955 | N/A | N/A | 12496 | 12511 | AATTCACCTTGACTAA | AₖₛAₖₛTₖₛT_{ds}C_{ys}A_{ds}^{m}C_{ds}^{m}C_{ds} | 0 | 2144 |
| | | | | | | T_{ds}T_{ds}G_{ds}A_{ds}^{m}C_{ds}TₖₛAₖₛAₖ | | |

TABLE 47
Inhibition of HSD17B13 RNA by modified oligonucleotides targeting SEQ ID NO.: 1, and 2

| | SEQ ID | SEQ ID | SEQ ID | SEQ ID | | | | |
|---|---|---|---|---|---|---|---|---|
| | NO: 1 | NO: 1 | NO: 2 | NO: 2 | | | | SEQ |
| Compound | Start | Stop | Start | Stop | | Chemistry Notation | % | ID |
| Number | Site | Site | Site | Site | Sequence (5′ to 3′) | (5′ to 3′) | inhibition | NO |
| 1245927 | N/A | N/A | 3433 | 3448 | AGTAGATGGTAAGTCA | AₖₛGₖₛTₖₛA_{ds}G_{ds}A_{ds}T_{ds}G_{ds}G_{ds} | 86 | 121 |
| | | | | | | T_{ds}A_{ds}A_{ds}G_{ds}Tₖₛ^{m}CₖₛAₖ | | |
| 1246023 | N/A | N/A | 5046 | 5061 | GAGTGAATCATTCAGT | GₖₛAₖₛGₖₛT_{ds}G_{ds}A_{ds}A_{ds}T_{ds}^{m}C_{ds} | 87 | 1526 |
| | | | | | | A_{ds}T_{ds}T_{ds}^{m}C_{ds}AₖₛGₖₛTₖ | | |
| 1341649 | 1314 | 1329 | 21129 | 21144 | CAGTCTTAAACCTTCC | ^{m}CₖₛAₖₛGₖₛT_{ds}C_{ys}T_{ds}T_{ds}A_{ds}A_{ds} | 59 | 30 |
| | | | | | | A_{ds}^{m}C_{ds}^{m}C_{ds}T_{ds}Tₖₛ^{m}Cₖₛ^{m}Cₖ | | |
| 1341652 | 1318 | 1333 | 21133 | 21148 | TGAACAGTCTTAAACC | TₖₛGₖₛAₖₛA_{ds}C_{ys}A_{ds}G_{ds}T_{ds}^{m}C_{ds} | 57 | 344 |
| | | | | | | T_{ds}T_{ds}A_{ds}A_{ds}Aₖₛ^{m}Ck^{m}Cₖ | | |
| 1341655 | 1256 | 1271 | 21071 | 21086 | GCTTUTGTCCACCTTT | Gₖₛ^{m}CₖₛTₖₛT_{ds}U_{ys}T_{ds}G_{ds}T_{ds}^{m}C_{ds} | 75 | 2845 |
| | | | | | | ^{m}C_{ds}A_{ds}^{m}C_{ds}^{m}C_{ds}TₖₛTₖₛTₖ | | |
| 1341666 | 1309 | 1324 | 21124 | 21139 | TTAAACCTTCCCTGTG | TₖₛTₖₛAₖₛA_{ds}A_{ys}^{m}C_{ds}^{m}C_{ds}T_{ds} | 23 | 2807 |
| | | | | | | T_{ds}^{m}C_{ds}^{m}C_{ds}^{m}C_{ds}T_{ds}GₖₛTₖₛGₖ | | |
| 1341669 | 1326 | 1341 | 21141 | 21156 | ATGCUACTTGAACAGT | AₖₛTₖₛGₖₛ^{m}G_{ds}U_{ys}A_{ds}^{m}C_{ds}T_{ds} | 46 | 2846 |
| | | | | | | T_{ds}G_{ds}A_{ds}A_{ds}^{m}C_{ds}AₖₛGₖₛTₖ | | |
| 1341671 | 1330 | 1345 | 21145 | 21160 | TGGAATGCTACTTGAA | TₖₛGₖₛGₖₛA_{ds}A_{ys}T_{ds}G_{ds}^{m}C_{ds}T_{ds} | 79 | 2203 |
| | | | | | | A_{ds}^{m}C_{ds}T_{ds}T_{ds}GₖₛAₖₛAₖ | | |
| 1341673 | 1336 | 1351 | 21151 | 21166 | ACAGATTGGAATGCTA | Aₖₛ^{m}CₖₛAₖₛG_{ds}A_{ys}T_{ds}T_{ds}G_{ds}G_{ds} | 70 | 1668 |
| | | | | | | A_{ds}A_{ds}T_{ds}G_{ds}^{m}CₖₛTₖₛAₖ | | |
| 1341674 | 1322 | 1337 | 21137 | 21152 | TACTUGAACAGTCTTA | TₖₛAₖₛ^{m}CₖₛT_{ds}U_{ys}G_{ds}A_{ds}A_{ds} | 38 | 2847 |
| | | | | | | ^{m}C_{ds}A_{ds}G_{ds}T_{ds}^{m}C_{ds}TₖₛTₖₛAₖ | | |
| 1341686 | 1344 | 1359 | 21159 | 21174 | GCATGGCTACAGATTG | Gₖₛ^{m}CₖₛAₖₛT_{ds}G_{ys}G_{ds}^{m}C_{ds}T_{ds} | 76 | 267 |
| | | | | | | A_{ds}^{m}C_{ds}A_{ds}G_{ds}A_{ds}TₖₛTₖₛGₖ | | |
| 1341689 | 1354 | 1369 | 21169 | 21184 | ATATUCTGTGGCATGG | AₖₛTₖₛAₖₛT_{ds}U_{ys}^{m}C_{ds}T_{ds}G_{ds}T_{ds} | 63 | 2848 |
| | | | | | | G_{ds}G_{ds}^{m}C_{ds}A_{ds}TₖₛGₖₛGₖ | | |
| 1341693 | 1358 | 1373 | 21173 | 21188 | GTTGATATTCTGTGGC | GₖₛTₖₛTₖₛG_{ds}A_{ys}T_{ds}A_{ds}T_{ds}T_{ds} | 68 | 1280 |
| | | | | | | ^{m}C_{ds}T_{ds}G_{ds}T_{ds}GₖₛGₖₛ^{m}Cₖ | | |
| 1341694 | 1349 | 1364 | 21164 | 21179 | CTGTGGCATGGCTACA | ^{m}CₖₛTₖₛGₖₛT_{ds}G_{ys}G_{ds}^{m}C_{ds}A_{ds} | 35 | 657 |
| | | | | | | T_{ds}G_{ds}G_{ds}^{m}C_{ds}T_{ds}Aₖₛ^{m}CₖₛAₖ | | |
| 1341701 | 1389 | 1404 | 21204 | 21219 | TCTCUTAGCTGTGCAC | Tₖₛ^{m}CₖₛTₖₛ^{m}C_{ds}U_{ys}T_{ds}A_{ds}G_{ds} | 49 | 2849 |
| | | | | | | ^{m}C_{ds}T_{ds}G_{ds}T_{ds}G_{ds}^{m}CₖₛAₖₛ^{m}Cₖ | | |
| 1341706 | 1367 | 1382 | 21182 | 21197 | TGTGUTCTTGTTGATA | TₖₛGₖₛTₖₛG_{ds}U_{ys}T_{ds}^{m}C_{ds}T_{ds}T_{ds} | 41 | 2850 |
| | | | | | | G_{ds}T_{ds}T_{ds}G_{ds}AₖₛTₖₛAₖ | | |
| 1341707 | 698 | 713 | 12116 | 12131 | GAGACATGAGGTTTTG | GₖₛAₖₛGₖₛA_{ds}C_{ys}A_{ds}T_{ds}G_{ds}A_{ds} | 61 | 725 |
| | | | | | | G_{ds}G_{ds}T_{ds}T_{ds}TₖₛTₖₛGₖ | | |
| 1341708 | 1395 | 1410 | 21210 | 21225 | ACTTGATCTCTTAGCT | Aₖₛ^{m}CₖₛTₖₛT_{ds}G_{ys}A_{ds}T_{ds}^{m}C_{ds} | 39 | 813 |
| | | | | | | T_{ds}^{m}C_{ds}T_{ds}T_{ds}A_{ds}Gₖₛ^{m}CₖₛTₖ | | |
| 1341709 | 1418 | 1433 | 21233 | 21248 | TTGAGATAAAGCTGCC | TₖₛTₖₛGₖₛA_{ds}G_{ys}A_{ds}T_{ds}A_{ds}A_{ds} | 51 | 1670 |
| | | | | | | A_{ds}G_{ds}^{m}C_{ds}T_{ds}Gₖₛ^{m}Cₖₛ^{m}Cₖ | | |
| 1341717 | 1422 | 1437 | 21237 | 21252 | CAGGUTGAGATAAAGC | ^{m}CₖₛAₖₛGₖₛG_{ds}U_{ys}T_{ds}G_{ds}A_{ds} | 55 | 2851 |
| | | | | | | G_{ds}A_{ds}T_{ds}A_{ds}A_{ds}AₖₛGₖₛ^{m}Cₖ | | |
| 1341722 | 1466 | 1481 | 21281 | 21296 | AGAGGCTAGGGAAATC | AₖₛGₖₛAₖₛG_{ds}G_{ys}^{m}C_{ds}T_{ds}A_{ds} | 48 | 1048 |
| | | | | | | G_{ds}G_{ds}G_{ds}A_{ds}A_{ds}AₖₛTₖₛ^{m}Cₖ | | |
| 1341723 | 1429 | 1444 | 21244 | 21259 | ATATGTCCAGGTTGAG | AₖₛTₖₛAₖₛT_{ds}G_{ys}T_{ds}^{m}C_{ds}^{m}C_{ds} | 48 | 425 |
| | | | | | | A_{ds}G_{ds}G_{ds}T_{ds}T_{ds}GₖₛAₖₛGₖ | | |
| 1341733 | 1491 | 1506 | 21306 | 21321 | ACCGUTTTGGGCTAAT | Aₖₛ^{m}Cₖₛ^{m}CₖₛG_{ds}U_{ys}T_{ds}T_{ds}T_{ds} | 65 | 2852 |
| | | | | | | G_{ds}G_{ds}G_{ds}^{m}C_{ds}T_{ds}AₖₛAₖₛTₖ | | |
| 1341737 | 1495 | 1510 | 21310 | 21325 | TTGCACCGTTTTGGGC | TₖₛTₖₛGₖₛ^{m}C_{ds}A_{ys}^{m}C_{ds}^{m}C_{ds}G_{ds} | 50 | 1749 |
| | | | | | | T_{ds}T_{ds}T_{ds}T_{ds}G_{ds}GₖₛGₖₛ^{m}Cₖ | | |
| 1341740 | 1499 | 1514 | 21314 | 21329 | AGAGUTGCACCGTTTT | AₖₛGₖₛAₖₛG_{ds}U_{ys}T_{ds}G_{ds}^{m}C_{ds} | 68 | 2853 |
| | | | | | | A_{ds}^{m}C_{ds}^{m}C_{ds}G_{ds}T_{ds}TₖₛTₖₛTₖ | | |
| 1341741 | 1624 | 1639 | 21439 | 21454 | ATAGAGTCGGTCACCT | AₖₛTₖₛAₖₛG_{ds}A_{ys}G_{ds}T_{ds}^{m}C_{ds}G_{ds} | 50 | 584 |
| | | | | | | G_{ds}T_{ds}^{m}C_{ds}A_{ds}^{m}Cₖₛ^{m}CₖₛTₖ | | |
| 1341742 | 1600 | 1615 | 21415 | 21430 | GTATCTTATAAGACTA | GₖₛTₖₛAₖₛT_{ds}C_{ys}T_{ds}T_{ds}A_{ds}T_{ds} | 79 | 1595 |
| | | | | | | A_{ds}A_{ds}G_{ds}A_{ds}^{m}CₖₛTₖₛAₖ | | |
| 1341751 | 1616 | 1631 | 21431 | 21446 | GGTCACCTTTCATAAT | GₖₛGₖₛTₖₛ^{m}C_{ds}A_{ys}^{m}C_{ds}^{m}C_{ds}T_{ds} | 48 | 1985 |
| | | | | | | T_{ds}T_{ds}^{m}C_{ds}A_{ds}T_{ds}AₖₛAₖₛTₖ | | |
| 1341756 | 798 | 813 | 15679 | 15694 | TTCCATCTATCAGACT | TₖₛTₖₛ^{m}Cₖₛ^{m}C_{ds}A_{ys}T_{ds}^{m}C_{ds}T_{ds} | 38 | 571 |
| | | | | | | A_{ds}T_{ds}^{m}C_{ds}A_{ds}G_{ds}Aₖₛ^{m}CₖₛTₖ | | |
| 1341757 | 1620 | 1635 | 21435 | 21450 | AGTCGGTCACCTTTCA | AₖₛGₖₛTₖₛ^{m}C_{ds}G_{ys}G_{ds}T_{ds}^{m}C_{ds} | 61 | 272 |
| | | | | | | A_{ds}^{m}C_{ds}^{m}C_{ds}T_{ds}T_{ds}Tₖₛ^{m}CₖₛAₖ | | |
| 1341760 | 1712 | 1727 | 21527 | 21542 | ACATCTCTGGGACCAA | Aₖₛ^{m}CₖₛAₖₛT_{ds}C_{ys}T_{ds}^{m}C_{ds}T_{ds} | 68 | 195 |
| | | | | | | G_{ds}G_{ds}G_{ds}A_{ds}^{m}C_{ds}^{m}CₖₛAₖₛAₖ | | |
| 1341765 | 1628 | 1643 | 21443 | 21458 | TAAAATAGAGTCGGTC | TₖₛAₖₛAₖₛA_{ds}A_{ys}T_{ds}A_{ds}G_{ds}A_{ds} | 52 | 895 |
| | | | | | | G_{ds}T_{ds}^{m}C_{ds}G_{ds}GₖₛTₖₛ^{m}Cₖ | | |
| 1341770 | 1721 | 1736 | 21536 | 21551 | ATTGUCTAAACATCTC | AₖₛTₖₛTₖₛG_{ds}U_{ys}^{m}C_{ds}T_{ds}A_{ds}A_{ds} | 73 | 2854 |
| | | | | | | A_{ds}^{m}C_{ds}A_{ds}T_{ds}^{m}CₖₛTₖₛ^{m}Cₖ | | |
| 1341771 | 1716 | 1731 | 21531 | 21546 | CTAAACATCTCTGGGA | ^{m}CₖₛTₖₛAₖₛA_{ds}A_{ys}^{m}C_{ds}A_{ds}T_{ds} | 32 | 2259 |
| | | | | | | ^{m}C_{ds}T_{ds}^{m}C_{ds}T_{ds}G_{ds}GₖₛGₖₛAₖ | | |
| 1341776 | 1707 | 1722 | 21522 | 21537 | TCTGGGACCAAGGATA | Tₖₛ^{m}CₖₛTₖₛG_{ds}G_{ys}G_{ds}A_{ds}^{m}C_{ds} | 31 | 1830 |
| | | | | | | ^{m}C_{ds}A_{ds}A_{ds}G_{ds}G_{ds}AₖₛTₖₛAₖ | | |
| 1341779 | 1752 | 1767 | 21567 | 21582 | TCCTGTGTTAGCTTTA | Tₖₛ^{m}Cₖₛ^{m}CₖₛT_{ds}G_{ys}T_{ds}G_{ds}T_{ds} | 72 | 1442 |
| | | | | | | T_{ds}A_{ds}G_{ds}^{m}C_{ds}T_{ds}TₖₛTₖₛAₖ | | |
| 1341784 | 1771 | 1786 | 21586 | 21601 | TAGCCAGTACAGTTCC | TₖₛAₖₛGₖₛ^{m}C_{ds}C_{ys}A_{ds}G_{ds}T_{ds}A_{ds} | 70 | 1987 |
| | | | | | | ^{m}C_{ds}A_{ds}G_{ds}T_{ds}Tₖₛ^{m}Cₖₛ^{m}Cₖ | | |
| 1341791 | 1784 | 1799 | 21599 | 21614 | GTTTCTTATGTAATAG | GₖₛTₖₛTₖₛT_{ds}C_{ys}T_{ds}T_{ds}A_{ds}T_{ds} | 25 | 897 |
| | | | | | | G_{ds}T_{ds}A_{ds}A_{ds}TₖₛAₖₛGₖ | | |
| 1341795 | 1776 | 1791 | 21591 | 21606 | TGTAATAGCCAGTACA | TₖₛGₖₛTₖₛA_{ds}A_{ys}T_{ds}A_{ds}G_{ds}^{m}C_{ds} | 40 | 352 |
| | | | | | | ^{m}C_{ds}A_{ds}G_{ds}T_{ds}Aₖₛ^{m}CₖₛAₖ | | |
| 1341797 | 1780 | 1795 | 21595 | 21610 | CTTAUGTAATAGCCAG | ^{m}CₖₛTₖₛTₖₛA_{ds}U_{ys}G_{ds}T_{ds}A_{ds}A_{ds} | 75 | 2855 |
| | | | | | | T_{ds}A_{ds}G_{ds}^{m}C_{ds}^{m}CₖₛAₖₛGₖ | | |
| 1341799 | 2196 | 2211 | 22011 | 22026 | GATTAGTCTTGATGTA | GₖₛAₖₛTₖₛT_{ds}A_{ys}G_{ds}T_{ds}mG_{ds}T_{ds} | 45 | 1521 |
| | | | | | | T_{ds}G_{ds}A_{ds}T_{ds}GₖₛTₖₛAₖ | | |
| 1341804 | 2189 | 2204 | 22004 | 22019 | CTTGATGTAGTGGGAG | ^{m}GₖₛTₖₛTₖₛG_{ds}A_{ys}T_{ds}G_{ds}T_{ds}A_{ds} | 67 | 976 |
| | | | | | | G_{ds}T_{ds}G_{ds}G_{ds}GₖₛAₖₛGₖ | | |
| 1341808 | 2353 | 2368 | 22168 | 22183 | ATAACTACAAGAGGTT | AₖₛTₖₛAₖₛA_{ds}C_{ys}T_{ds}A_{ds}^{m}C_{ds}A_{ds} | 61 | 1133 |
| | | | | | | A_{ds}G_{ds}A_{ds}G_{ds}GₖₛTₖₛTₖ | | |
| 1341813 | 2252 | 2267 | 22067 | 22082 | AGAGGATAGTCCATGC | AₖₛGₖₛAₖₛG_{ds}G_{ys}A_{ds}T_{ds}A_{ds}G_{ds} | 53 | 354 |
| | | | | | | T_{ds}^{m}C_{ds}^{m}C_{ds}A_{ds}TₖₛGₖₛ^{m}Cₖ | | |
| 1341818 | 610 | 625 | N/A | N/A | GAACAATATGGGATGA | GₖₛAₖₛAₖₛ^{m}C_{ds}A_{ys}A_{ds}T_{ds}A_{ds}T_{ds} | 50 | 1735 |
| | | | | | | G_{ds}G_{ds}G_{ds}A_{ds}TₖₛGₖₛAₖ | | |
| 1341823 | N/A | N/A | 9516 | 9531 | ACACUAATATTGAGGC | Aₖₛ^{m}CₖₛAₖₛ^{m}C_{ds}U_{ys}A_{ds}A_{ds}T_{ds} | 43 | 2856 |
| | | | | | | A_{ds}T_{ds}T_{ds}G_{ds}A_{ds}GₖₛGₖₛ^{m}Cₖ | | |
| 1341824 | 810 | 825 | 15691 | 15706 | TATTGGTAAGTATTCC | TₖₛAₖₛTₖₛT_{ds}G_{ys}G_{ds}T_{ds}A_{ds}A_{ds} | 41 | 1272 |
| | | | | | | G_{ds}T_{ds}A_{ds}T_{ds}Tₖₛ^{m}Cₖₛ^{m}Cₖ | | |
| 1341826 | N/A | N/A | 9334 | 9349 | CGATCCTATATACATC | ^{m}CₖₛGₖₛAₖₛT_{ds}C_{ys}^{m}C_{ds}T_{ds}A_{ds} | 28 | 2788 |
| | | | | | | T_{ds}A_{ds}T_{ds}A_{ds}^{m}C_{ds}AₖₛTₖₛ^{m}Cₖ | | |
| 1341835 | N/A | N/A | 9968 | 9983 | AGTAGTGTAAGCTGAG | AₖₛGₖₛTₖₛA_{ds}G_{ys}T_{ds}G_{ds}T_{ds}A_{ds} | 68 | 2155 |
| | | | | | | A_{ds}G_{ds}^{m}C_{ds}T_{ds}GₖₛAₖₛGₖ | | |
| 1341837 | N/A | N/A | 9603 | 9618 | CACAUATGTGAAGAGC | ^{m}CkSAₖₛ^{m}CₖₛA_{ds}U_{ys}A_{ds}T_{ds}G_{ds} | 65 | 2857 |
| | | | | | | T_{ds}G_{ds}A_{ds}A_{ds}G_{ds}AₖₛGₖₛ^{m}Cₖ | | |
| 1341843 | N/A | N/A | 11568 | 11583 | TGACAATGGTTGATAG | TₖₛGₖₛAₖₛ^{m}C_{ds}A_{ys}A_{ds}T_{ds}G_{ds}G_{ds} | 42 | 1700 |
| | | | | | | T_{ds}T_{ds}G_{ds}A_{ds}TₖₛAₖₛGₖ | | |
| 1341844 | N/A | N/A | 11853 | 11868 | AGCAGAATTGTGAACG | AₖₛGₖₛ^{m}CₖₛA_{ds}G_{ys}A_{ds}A_{ds}T_{ds}T_{ds} | 51 | 844 |
| | | | | | | G_{ds}T_{ds}G_{ds}A_{ds}Aₖₛ^{m}CₖₛGₖ | | |
| 1341848 | N/A | N/A | 12421 | 12436 | TGGTAACGGTGATCAA | TₖₛGₖₛGₖₛT_{ds}A_{ys}A_{ds}^{m}C_{ds}G_{ds}G_{ds} | 41 | 67 |
| | | | | | | T_{ds}G_{ds}A_{ds}T_{ds}^{m}CₖₛAₖₛAₖ | | |
| 1341854 | N/A | N/A | 14199 | 14214 | TATTATGTGATTGAGT | TₖₛAₖₛTₖₛT_{ds}A_{ys}T_{ds}G_{ds}T_{ds}G_{ds} | 28 | 73 |
| | | | | | | A_{ds}T_{ds}T_{ds}G_{ds}AₖₛGₖₛTₖ | | |
| 1341858 | N/A | N/A | 14918 | 14933 | TAATACATTAGCAAGC | TₖₛAₖₛAₖₛT_{ds}A_{ys}^{m}C_{ds}A_{ds}T_{ds}T_{ds} | 26 | 2266 |
| | | | | | | A_{ds}G_{ds}^{m}C_{ds}A_{ds}AₖₛGₖₛ^{m}Cₖ | | |
| 1341865 | 1019 | 1034 | 20834 | 20849 | TGCAGCATTGATTCGA | TₖₛGₖₛ^{m}CₖₛA_{ds}G_{ys}^{m}C_{ds}A_{ds} | 65 | 419 |
| | | | | | | T_{ds}T_{ds}G_{ds}A_{ds}T_{ds}T_{ds}^{m}CₖₛGₖₛAₖ | | |
| 1341866 | N/A | N/A | 15498 | 15513 | TGCTGCATTAATGCCA | TₖₛGₖₛ^{m}CₖₛT_{ds}G_{ys}^{m}C_{ds}A_{ds}T_{ds} | 32 | 2485 |
| | | | | | | T_{ds}A_{ds}A_{ds}T_{ds}G_{ds}^{m}Cₖₛ^{m}CₖₛAₖ | | |
| 1341869 | N/A | N/A | 16129 | 16144 | TCCAUAATAATAGCTC | Tₖₛ^{m}Cₖₛ^{m}CₖₛA_{ds}U_{ys}A_{ds}A_{ds}T_{ds} | 58 | 2858 |
| | | | | | | A_{ds}A_{ds}T_{ds}A_{ds}G_{ds}^{m}CₖₛTₖₛ^{m}Cₖ | | |
| 1341872 | N/A | N/A | 16292 | 16307 | TTAGUTAGAATAGTCT | TₖₛTₖₛAₖₛG_{ds}U_{ys}T_{ds}A_{ds}G_{ds}A_{ds} | 35 | 2859 |
| | | | | | | A_{ds}T_{ds}A_{ds}GdSTₖₛ^{m}CₖₛTₖ | | |
| 1341875 | N/A | N/A | 16223 | 16238 | CTTTUTATAGACTGGG | ^{m}CₖₛTₖₛTₖₛT_{ds}U_{ys}T_{ds}A_{ds}T_{ds}A_{ds} | 34 | 2860 |
| | | | | | | G_{ds}A_{ds}^{m}C_{ds}T_{ds}GₖₛGₖₛGₖ | | |
| 1341879 | N/A | N/A | 17990 | 18005 | TTAGUATAGTTATCTT | TₖₛTₖₛAₖₛG_{ds}U_{ys}A_{ds}T_{ds}A_{ds}G_{ds} | 22 | 2861 |
| | | | | | | T_{ds}T_{ds}A_{ds}T_{ds}^{m}CₖₛTₖₛTₖ | | |
| 1341881 | N/A | N/A | 17995 | 18010 | TGAAGTTAGTATAGTT | TₖₛGₖₛAₖₛA_{ds}G_{ys}T_{ds}T_{ds}A_{ds}G_{ds} | 62 | 1405 |
| | | | | | | T_{ds}A_{ds}T_{ds}A_{ds}GₖₛTₖₛTₖ | | |
| 1341884 | N/A | N/A | 16384 | 16399 | AATCCCAACCAAACTT | AₖₛAₖₛTₖₛm_{ds}C_{ys}m_{ds}A_{ds}A_{ds} | 7 | 2755 |
| | | | | | | ^{m}C_{ds}^{m}C_{ds}A_{ds}A_{ds}A_{ds}^{m}CₖₛTₖₛTₖ | | |
| 1341888 | N/A | N/A | 18095 | 18110 | AATTGATACACCAATG | AₖₛAₖₛTₖₛT_{ds}G_{ys}A_{ds}T_{ds}A_{ds}^{m}C_{ds} | 40 | 2525 |
| | | | | | | A_{ds}^{m}C_{ds}^{m}C_{ds}A_{ds}AₖₛTₖₛGₖ | | |
| 1341897 | 1084 | 1099 | 20899 | 20914 | CTGCUGCTAGTGCCAA | ^{m}CₖₛTₖₛGₖₛ^{m}C_{ds}U_{ys}G_{ds}^{m}C_{ds}T_{ds} | 66 | 2862 |
| | | | | | | A_{ds}G_{ds}T_{ds}G_{ds}^{m}C_{ds}^{m}CₖₛAₖₛAₖ | | |
| 1341902 | N/A | N/A | 19913 | 19928 | GTGCATCTTAAGATAC | GₖₛTₖₛGₖₛ^{m}C_{ds}A_{ys}T_{ds}^{m}C_{ds}T_{ds} | 40 | 2806 |
| | | | | | | T_{ds}A_{ds}A_{ds}G_{ds}A_{ds}TₖₛAₖₛ^{m}Cₖ | | |
| 1341906 | N/A | N/A | 18693 | 18708 | AGACUTTGAGACTCTT | AₖₛGₖₛAₖₛ^{m}C_{ds}U_{ys}T_{ds}T_{ds}G_{ds}A_{ds} | 48 | 2863 |
| | | | | | | G_{ds}A_{ds}^{m}C_{ds}T_{ds}^{m}CₖₛTₖₛTₖ | | |
| 1341909 | N/A | N/A | 19909 | 19924 | ATCTUAAGATACCCAG | AₖₛTₖₛ^{m}CₖₛT_{ds}U_{ys}A_{ds}A_{ds}G_{ds}A_{ds} | 55 | 2864 |
| | | | | | | T_{ds}A_{ds}^{m}C_{ds}^{m}C_{ds}^{m}CₖₛAₖₛGₖ | | |
| 1341911 | 1080 | 1095 | 20895 | 20910 | TGCTAGTGCCAAACCA | TₖₛGₖₛ^{m}CₖₛT_{ds}A_{ys}G_{ds}T_{ds}G_{ds} | 80 | 1432 |
| | | | | | | ^{m}C_{ds}^{m}C_{ds}A_{ds}A_{ds}A_{ds}^{m}Cₖₛ^{m}CₖₛAₖ | | |
| 1341912 | N/A | N/A | 19905 | 19920 | TAAGATACCCAGGTTG | TₖₛAₖₛAₖₛG_{ds}A_{ys}T_{ds}A_{ds}^{m}C_{ds} | 11 | 2790 |
| | | | | | | ^{m}C_{ds}^{m}C_{ds}A_{ds}G_{ds}G_{ds}TₖₛTₖₛGₖ | | |
| 1341922 | N/A | N/A | 20114 | 20129 | GCATCAAGACATTCTA | Gₖₛ^{m}CₖₛAₖₛT_{ds}C_{ys}A_{ds}A_{ds}G_{ds} | 51 | 1565 |
| | | | | | | A _{ds}^{m}C_{ds}A_{ds}T_{ds}T_{ds}^{m}CₖₛTₖₛAₖ | | |
| 1341926 | N/A | N/A | 19999 | 20014 | CAGTUTTCCTCATGAT | ^{m}CₖₛAₖₛGₖₛT_{ds}U_{ys}T_{ds}T_{ds}^{m}C_{ds} | 0 | 2865 |
| | | | | | | ^{m}C_{ds}T_{ds}^{m}C_{ds}A_{ds}T_{ds}GₖₛAₖₛTₖ | | |
| 1341932 | 1076 | 1091 | 20891 | 20906 | AGTGCCAAACCAATGT | AₖₛGₖₛTₖₛG_{ds}C_{ys}C_{ds}A_{ds}A_{ds} | 24 | 1120 |
| | | | | | | A_{ds}^{m}C_{ds}^{m}C_{ds}A_{ds}A_{ds}TₖₛGₖₛTₖ | | |
| 1341933 | N/A | N/A | 20388 | 20403 | CTATAGTAATCACAAG | ^{m}CₖₛTₖₛAₖₛT_{ds}A_{ys}G_{ds}T_{ds}A_{ds}A_{ds} | 37 | 1644 |
| | | | | | | T_{ds}^{m}C_{ds}A_{ds}^{m}C_{ds}AₖₛAₖₛGₖ | | |
| 1341935 | N/A | N/A | 20190 | 20205 | AGTTATTAGAAGTCAG | AₖₛGₖₛTₖₛT_{ds}A_{ys}T_{ds}T_{ds}A_{ds}G_{ds} | 25 | 2746 |
| | | | | | | A_{ds}A_{ds}G_{ds}T_{ds}^{m}CₖₛAₖₛGₖ | | |
| 1341938 | N/A | N/A | 20378 | 20393 | CACAAGTAAGGTAAAG | ^{m}CₖₛAₖₛ^{m}CₖₛA_{ds}A_{ys}G_{ds}T_{ds}A_{ds} | 43 | 2448 |
| | | | | | | A_{ds}G_{ds}G_{ds}T_{ds}A_{ds}AₖₛAₖₛGₖ | | |
| 1341944 | N/A | N/A | 20484 | 20499 | CTTCATAGTGGACTTC | ^{m}CₖₛTₖₛTₖₛ^{m}C_{ds}A_{ys}T_{ds}A_{ds}G_{ds} | 35 | 711 |
| | | | | | | T_{ds}G_{ds}G_{ds}A_{ds}^{m}C_{ds}TₖₛTₖₛ^{m}Cₖ | | |
| 1341952 | N/A | N/A | 12804 | 12819 | CTCAGGCTGTAAGAGT | ^{m}CₖₛTₖₛ^{m}CₖₛA_{ds}G_{ys}G_{ds}^{m}C_{ds}T_{ds} | 46 | 2240 |
| | | | | | | G_{ds}T_{ds}A_{ds}A_{ds}G_{ds}AₖₛGₖₛTₖ | | |
| 1341956 | N/A | N/A | 12499 | 12514 | AGAAATTCACCTTGAC | AₖₛGₖₛAₖₛA_{ds}A_{ys}T_{ds}T_{ds}^{m}C_{ds}A_{ds} | 9 | 2284 |
| | | | | | | ^{m}C_{ds}^{m}C_{ds}T_{ds}T_{ds}GₖₛAₖₛ^{m}Cₖ | | |

TABLE 48
Inhibition of HSD17B13 RNA by modified oligonucleotides targeting SEQ ID NO.: 1, and 2

| | SEQ ID | SEQ ID | SEQ ID | SEQ ID | | | | |
|---|---|---|---|---|---|---|---|---|
| | NO: 1 | NO: 1 | NO: 2 | NO: 2 | | | | |
| Compound | Start | Stop | Start | Stop | | Chemistry Notation | % | SEQ |
| Number | Site | Site | Site | Site | Sequence (5′ to 3′) | (5′ to 3′) | inhibition | ID NO |
| 1245927 | N/A | N/A | 3433 | 3448 | AGTAGATGGTAAGTCA | AₖₛGₖₛTₖₛA_{ds}G_{ds}A_{ds}T_{ds}G_{ds}G_{ds} | 82 | 121 |
| | | | | | | T_{ds}A_{ds}A_{ds}G_{ds}Tₖₛ^{m}CₖₛAₖ | | |
| 1246023 | N/A | N/A | 5046 | 5061 | GAGTGAATCATTCAGT | GₖₛAₖₛGₖₛT_{ds}G_{ds}A_{ds}A_{ds}T_{ds}^{m}C_{ds} | 86 | 1526 |
| | | | | | | A_{ds}T_{ds}T_{ds}^{m}C_{ds}AₖₛGₖₛTₖ | | |
| 1341651 | 1315 | 1330 | 21130 | 21145 | ACAGUCTTAAACCTTC | Aₖₛ^{m}CₖₛAₖₛG_{ds}U_{ys}^{m}C_{ds}T_{ds}T_{ds} | 81 | 2866 |
| | | | | | | A_{ds}A_{ds}A_{ds}^{m}C_{ds}^{m}C_{ds}TₖₛTₖₛ^{m}Cₖ | | |
| 1341656 | 1257 | 1272 | 21072 | 21087 | AGCTUTTGTCCACCTT | AₖₛGₖₛ^{m}CₖₛT_{ds}U_{ys}T_{ds}T_{ds}G_{ds}T_{ds} | 72 | 2867 |
| | | | | | | ^{m}C_{ds}^{m}C_{ds}A_{ds}^{m}C_{ds}^{m}CₖₛTₖₛTₖ | | |
| 1341657 | 613 | 628 | N/A | N/A | CTGGAACAATATGGGA | ^{m}CₖₛTₖₛGₖₛG_{ds}A_{ys}A_{ds}^{m}C_{ds}A_{ds} | 45 | 1969 |
| | | | | | | A_{ds}T_{ds}A_{ds}T_{ds}G_{ds}G_{ds}GₖₛAₖ | | |
| 1341659 | 1327 | 1342 | 21142 | 21157 | AATGCTACTTGAACAG | AₖₛAₖₛTₖₛG_{ds}C_{ys}T_{ds}A_{ds}^{m}C_{ds}T_{ds} | 34 | 1045 |
| | | | | | | T_{ds}G_{ds}A_{ds}A_{ds}^{m}CₖₛAₖₛGₖ | | |
| 1341662 | 1319 | 1334 | 21134 | 21149 | TTGAACAGTCTTAAAC | TₖₛTₖₛGₖₛA_{ds}A_{ys}^{m}C_{ds}A_{ds}G_{ds}T_{ds} | 11 | 422 |
| | | | | | | ^{m}C_{ds}T_{ds}T_{ds}A_{ds}AₖₛAₖₛ^{m}Cₖ | | |
| 1341665 | 1310 | 1325 | 21125 | 21140 | CTTAAACCTTCCCTGT | ^{m}CₖₛTₖₛTₖₛA_{ds}A_{ys}A_{ds}^{m}C_{ds}^{m}C_{ds} | 24 | 1823 |
| | | | | | | T_{ds}T_{ds}^{m}C_{ds}^{m}C_{ds}^{m}C_{ds}TₖₛGₖₛTₖ | | |
| 1341675 | 1323 | 1338 | 21138 | 21153 | CTACUTGAACAGTCTT | ^{m}CₖₛTₖₛAₖₛ^{m}C_{ds}U_{ys}T_{ds}G_{ds}A_{ds} | 79 | 2868 |
| | | | | | | A_{ds}^{m}C_{ds}A_{ds}G_{ds}T_{ds}^{m}CₖₛTₖₛTₖ | | |
| 1341679 | 1355 | 1370 | 21170 | 21185 | GATAUTCTGTGGCATG | GsAₖₛTₖₛA_{ds}U_{ys}T_{ds}^{m}C_{ds}T_{ds}G_{ds} | 60 | 2869 |
| | | | | | | T_{ds}G_{ds}G_{ds}^{m}C_{ds}AₖₛTₖₛGₖ | | |
| 1341681 | 1337 | 1352 | 21152 | 21167 | TACAGATTGGAATGCT | TₖₛAₖₛ^{m}CₖₛA_{ds}G_{ys}A_{ds}T_{ds}T_{ds}G_{ds} | 60 | 1746 |
| | | | | | | G_{ds}A_{ds}A_{ds}T_{ds}Gₖₛ^{m}CₖₛTₖ | | |
| 1341682 | 700 | 715 | 12118 | 12133 | CAGAGACATGAGGTTT | ^{m}CₖₛAₖₛGₖₛA_{ds}G_{ys}A_{ds}^{m}C_{ds}A_{ds} | 61 | 2319 |
| | | | | | | T_{ds}G_{ds}A_{ds}G_{ds}G_{ds}TₖₛTₖₛTₖ | | |
| 1341684 | 1331 | 1346 | 21146 | 21161 | TTGGAATGCTACTTGA | TₖₛTₖₛGₖₛG_{ds}A_{ys}A_{ds}T_{ds}G_{ds}^{m}C_{ds} | 65 | 1279 |
| | | | | | | T_{ds}A_{ds}^{m}C_{ds}T_{ds}TₖₛGₖₛAₖ | | |
| 1341687 | 1346 | 1361 | 21161 | 21176 | TGGCATGGCTACAGAT | TₖₛGₖₛGₖₛ^{m}C_{ds}A_{ys}T_{ds}G_{ds}G_{ds} | 57 | 423 |
| | | | | | | ^{m}C_{ds}T_{ds}A_{ds}^{m}C_{ds}A_{ds}GₖₛAₖₛTₖ | | |
| 1341688 | 1359 | 1374 | 21174 | 21189 | TGTTGATATTCTGTGG | TₖₛGₖₛTₖₛT_{ds}G_{ys}A_{ds}T_{ds}A_{ds}T_{ds} | 48 | 1358 |
| | | | | | | T_{ds}^{m}C_{ds}T_{ds}G_{ds}TkSGₖₛGₖ | | |
| 1341695 | 1351 | 1366 | 21166 | 21181 | TTCTGTGGCATGGCTA | TₖₛTₖₛ^{m}CₖₛT_{ds}G_{ys}T_{ds}G_{ds}G_{ds}^{m}C_{ds} | 65 | 812 |
| | | | | | | A_{ds}T_{ds}G_{ds}G_{ds}mGₖₛTₖₛAₖ | | |
| 1341700 | 1384 | 1399 | 21199 | 21214 | TAGCUGTGCACTCATT | TₖₛAₖₛGₖₛ^{m}C_{ds}U_{ys}G_{ds}T_{ds}G_{ds} | 60 | 2870 |
| | | | | | | ^{m}C_{ds}A_{ds}^{m}C_{ds}T_{ds}^{m}C_{ds}AₖₛTₖₛTₖ | | |
| 1341704 | 1391 | 1406 | 21206 | 21221 | GATCUCTTAGCTGTGC | GₖₛAₖₛTₖₛ^{m}C_{ds}U_{ys}^{m}C_{ds}T_{ds}T_{ds} | 65 | 2871 |
| | | | | | | A_{ds}G_{ds}^{m}C_{ds}T_{ds}G_{ds}TₖₛGₖₛ^{m}Cₖ | | |
| 1341710 | 1419 | 1434 | 21234 | 21249 | GTTGAGATAAAGCTGC | GₖₛTₖₛTₖₛG_{ds}A_{ys}G_{ds}A_{ds}T_{ds}A_{ds} | 51 | 1748 |
| | | | | | | A_{ds}A_{ds}G_{ds}^{m}C_{ds}TₖₛGₖₛ^{m}Cₖ | | |
| 1341712 | 1423 | 1438 | 21238 | 21253 | CCAGGTTGAGATAAAG | ^{m}Cₖₛ^{m}CₖₛAₖₛG_{ds}G_{ys}T_{ds}T_{ds}G_{ds} | 49 | 33 |
| | | | | | | A_{ds}G_{ds}A_{ds}T_{ds}A_{ds}AₖₛAₖₛGₖ | | |
| 1341715 | 1398 | 1413 | 21213 | 21228 | GAAACTTGATCTCTTA | GₖₛAₖₛAₖₛA_{ds}C_{ys}T_{ds}T_{ds}G_{ds}A_{ds} | 59 | 2717 |
| | | | | | | T_{ds}^{m}C_{ds}T_{ds}^{m}C_{ds}TₖₛTₖₛAₖ | | |
| 1341720 | 1496 | 1511 | 21311 | 21326 | GTTGCACCGTTTTGGG | GₖₛTₖₛTₖₛG_{ds}C_{ys}A_{ds}^{m}C_{ds}^{m}C_{ds} | 38 | 1827 |
| | | | | | | G_{ds}T_{ds}T_{ds}T_{ds}T_{ds}GₖₛGₖₛGₖ | | |
| 1341724 | 1431 | 1446 | 21246 | 21261 | AAATATGTCCAGGTTG | AₖₛAₖₛAₖₛT_{ds}A_{ys}T_{ds}G_{ds}T_{ds}^{m}C_{ds} | 63 | 581 |
| | | | | | | ^{m}C_{ds}A_{ds}G_{ds}G_{ds}TₖₛTₖₛGₖ | | |
| 1341730 | 1488 | 1503 | 21303 | 21318 | GTTTUGGGCTAATGAA | GₖₛTₖₛTₖₛT_{ds}U_{ys}G_{ds}G_{ds}G_{ds}^{m}C_{ds} | 30 | 2872 |
| | | | | | | T_{ds}A_{ds}A_{ds}T_{ds}GₖₛAₖₛAₖ | | |
| 1341732 | 801 | 816 | 15682 | 15697 | GTATUCCATCTATCAG | GₖₛTₖₛAₖₛT_{ds}U_{ys}^{m}C_{ds}^{m}C_{ds}A_{ds} | 41 | 2873 |
| | | | | | | T_{ds}^{m}C_{ds}T_{ds}A_{ds}T_{ds}^{m}CₖₛAₖₛGₖ | | |
| 1341735 | 1492 | 1507 | 21307 | 21322 | CACCGTTTTGGGCTAA | ^{m}CₖₛAₖₛ^{m}Cks^{m}C_{ds}G_{ys}T_{ds}T_{ds}T_{ds} | 82 | 1516 |
| | | | | | | T_{ds}G_{ds}G_{ds}G_{ds}^{m}C_{ds}TₖₛAₖₛAₖ | | |
| 1341746 | 1501 | 1516 | 21316 | 21331 | ATAGAGTTGCACCGTT | AₖₛTₖₛAₖₛG_{ds}A_{ys}G_{ds}T_{ds}T_{ds}G_{ds} | 59 | 192 |
| | | | | | | ^{m}C_{ds}A_{ds}^{m}C_{ds}^{m}C_{ds}GₖₛTₖₛTₖ | | |
| 1341747 | 1602 | 1617 | 21417 | 21432 | ATGTATCTTATAAGAC | AₖₛTₖₛGₖₛT_{ds}A_{ys}T_{ds}^{m}C_{ds}T_{ds}T_{ds} | 3 | 1751 |
| | | | | | | A_{ds}T_{ds}A_{ds}A_{ds}GₖₛAₖₛ^{m}Cₖ | | |
| 1341749 | 1621 | 1636 | 21436 | 21451 | GAGTCGGTCACCTTTC | GₖₛAₖₛGₖₛT_{ds}C_{ys}G_{ds}G_{ds}T_{ds}^{m}C_{ds} | 55 | 350 |
| | | | | | | A_{ds}^{m}C_{ds}^{m}C_{ds}T_{ds}TₖₛTₖₛ^{m}Cₖ | | |
| 1341750 | 1625 | 1640 | 21440 | 21455 | AATAGAGTCGGTCACC | AₖₛAₖₛTₖₛA_{ds}G_{ys}A_{ds}G_{ds}T_{ds}^{m}C_{ds} | 57 | 662 |
| | | | | | | G_{ds}G_{ds}T_{ds}^{m}C_{ds}Aₖₛ^{m}Cₖₛ^{m}Cₖ | | |
| 1341752 | 1617 | 1632 | 21432 | 21447 | CGGTCACCTTTCATAA | ^{m}CₖₛGₖₛGₖₛT_{ds}C_{ys}A_{ds}^{m}C_{ds}^{m}C_{ds} | 42 | 36 |
| | | | | | | T_{ds}T_{ds}T_{ds}^{m}C_{ds}A_{ds}TₖₛAₖₛAₖ | | |
| 1341762 | 1713 | 1728 | 21528 | 21543 | AACAUCTCTGGGACCA | AₖₛAₖₛ^{m}CₖₛA_{ds}U_{ys}^{m}C_{ds}T_{ds}^{m}C_{ds} | 64 | 2874 |
| | | | | | | T_{ds}G_{ds}G_{ds}G_{ds}A_{ds}^{m}Cₖₛ^{m}CₖₛAₖ | | |
| 1341766 | 1629 | 1644 | 21444 | 21459 | TTAAAATAGAGTCGGT | TₖₛTₖₛAₖₛA_{ds}A_{ys}A_{ds}T_{ds}A_{ds}G_{ds} | 70 | 973 |
| | | | | | | A_{ds}G_{ds}T_{ds}^{m}C_{ds}GₖₛGₖₛTₖ | | |
| 1341769 | 1726 | 1741 | 21541 | 21556 | CTAAAATTGTCTAAAC | ^{m}CₖₛTₖₛAₖₛA_{ds}A_{ys}A_{ds}T_{ds}T_{ds}G_{ds} | 13 | 2590 |
| | | | | | | T_{ds}^{m}C_{ds}T_{ds}A_{ds}AₖₛAₖₛ^{m}Cₖ | | |
| 1341772 | 1717 | 1732 | 21532 | 21547 | TCTAAACATCTCTGGG | Tₖₛ^{m}CₖₛTₖₛA_{ds}A_{ys}A_{ds}^{m}C_{ds}A_{ds} | 36 | 2287 |
| | | | | | | T_{ds}^{m}C_{ds}T_{ds}^{m}C_{ds}T_{ds}GₖₛGₖₛGₖ | | |
| 1341775 | 1708 | 1723 | 21523 | 21538 | CTCTGGGACCAAGGAT | ^{m}CₖₛTₖₛ^{m}CₖₛT_{ds}G_{ys}G_{ds}G_{ds}A_{ds} | 43 | 1908 |
| | | | | | | ^{m}C_{ds}^{m}C_{ds}A_{ds}A_{ds}G_{ds}GₖₛAₖₛTₖ | | |
| 1341778 | 1773 | 1788 | 21588 | 21603 | AATAGCCAGTACAGTT | AₖₛAₖₛTₖₛA_{ds}G_{ys}^{m}C_{ds}^{m}C_{ds}A_{ds} | 66 | 118 |
| | | | | | | G_{ds}T_{ds}A_{ds}^{m}C_{ds}A_{ds}GₖₛTₖₛTₖ | | |
| 1341782 | 1766 | 1781 | 21581 | 21596 | AGTACAGTTCCTTTTC | AₖₛGₖₛTₖₛA_{ds}C_{ys}A_{ds}G_{ds}T_{ds}T_{ds} | 56 | 1597 |
| | | | | | | ^{m}C_{ds}^{m}C_{ds}T_{ds}T_{ds}TₖₛTₖₛ^{m}Cₖ | | |
| 1341790 | 791 | 806 | 15672 | 15687 | TATCAGACTTCTTACG | TₖₛAₖₛTₖₛ^{m}C_{ds}A_{ys}G_{ds}A_{ds}^{m}C_{ds} | 27 | 103 |
| | | | | | | T_{ds}T_{ds}^{m}C_{ds}T_{ds}T_{ds}Aₖₛ^{m}CₖₛGₖ | | |
| 1341794 | 1777 | 1792 | 21592 | 21607 | ATGTAATAGCCAGTAC | AₖₛTₖₛGₖₛT_{ds}A_{ys}A_{ds}T_{ds}A_{ds}G_{ds} | 42 | 430 |
| | | | | | | ^{m}C_{ds}^{m}C_{ds}A_{ds}G_{ds}TₖₛAₖₛ^{m}Cₖ | | |
| 1341798 | 1781 | 1796 | 21596 | 21611 | TCTTATGTAATAGCCA | Tₖₛ^{m}CₖₛTₖₛT_{ds}A_{ys}T_{ds}G_{ds}T_{ds}A_{ds} | 64 | 742 |
| | | | | | | A_{ds}T_{ds}A_{ds}G_{ds}^{m}Cₖₛ^{m}CₖₛAₖ | | |
| 1341802 | 2191 | 2206 | 22006 | 22021 | GTCTUGATGTAGTGGG | GₖₛTₖₛ^{m}CₖₛT_{ds}U_{ys}G_{ds}A_{ds}T_{ds}G_{ds} | 63 | 2875 |
| | | | | | | T_{ds}A_{ds}G_{ds}T_{ds}GₖₛGₖₛGₖ | | |
| 1341803 | 2184 | 2199 | 21999 | 22014 | TGTAGTGGGAGTCGGA | TₖₛGₖₛTₖₛA_{ds}G_{ys}T_{ds}G_{ds}G_{ds}G_{ds} | 50 | 587 |
| | | | | | | A_{ds}G_{ds}T_{ds}^{m}C_{ds}GₖₛGₖₛAₖ | | |
| 1341811 | 2355 | 2370 | 22170 | 22185 | TTATAACTACAAGAGG | TₖₛTₖₛAₖₛT_{ds}A_{ys}A_{ds}^{m}C_{ds}T_{ds}A_{ds} | 58 | 1289 |
| | | | | | | ^{m}C_{ds}A_{ds}A_{ds}G_{ds}AₖₛGₖₛGₖ | | |
| 1341812 | 812 | 827 | 15693 | 15708 | CTTAUTGGTAAGTATT | ^{m}CₖₛTₖₛTₖₛA_{ds}U_{ys}T_{ds}G_{ds}G_{ds}T_{ds} | 0 | 2876 |
| | | | | | | A_{ds}A_{ds}G_{ds}T_{ds}AₖₛTₖₛTₖ | | |
| 1341814 | 2254 | 2269 | 22069 | 22084 | CAAGAGGATAGTCCAT | ^{m}CₖₛAₖₛAₖₛG_{ds}A_{ys}G_{ds}G_{ds}A_{ds}T_{ds} | 60 | 510 |
| | | | | | | A_{ds}G_{ds}T_{ds}^{m}C_{ds}^{m}CₖₛAₖₛTₖ | | |
| 1341815 | 2245 | 2260 | 22060 | 22075 | AGTCCATGCAAAAGCA | AₖₛGₖₛTₖₛ^{m}C_{ds}C_{ys}A_{ds}T_{ds}G_{ds} | 73 | 120 |
| | | | | | | ^{m}C_{ds}A_{ds}A_{ds}A_{ds}A_{ds}Gₖₛ^{m}CₖₛAₖ | | |
| 1341819 | N/A | N/A | 9337 | 9352 | CCTCGATCCTATATAC | ^{m}Cₖₛ^{m}CₖₛTₖₛ^{m}C_{ds}G_{ys}A_{ds}T_{ds}^{m}C_{ds} | 9 | 2812 |
| | | | | | | mC_{ds}T_{ds}A_{ds}T_{ds}A_{ds}TₖₛAₖₛ^{m}Cₖ | | |
| 1341821 | N/A | N/A | 9518 | 9533 | CTACACTAATATTGAG | ^{m}CₖₛTₖₛAₖₛ^{m}C_{ds}A_{ys}^{m}C_{ds}T_{ds}A_{ds} | 29 | 59 |
| | | | | | | A_{ds}T_{ds}A_{ds}T_{ds}T_{ds}GₖₛAₖₛGₖ | | |
| 1341829 | N/A | N/A | 9961 | 9976 | TAAGCTGAGAGTTCTA | TₖₛAₖₛAₖₛG_{ds}C_{ys}T_{ds}G_{ds}A_{ds}G_{ds} | 27 | 2499 |
| | | | | | | A_{ds}G_{ds}T_{ds}T_{ds}^{m}CₖₛTₖₛAₖ | | |
| 1341834 | N/A | N/A | 9971 | 9986 | TTGAGTAGTGTAAGCT | TₖₛTₖₛGₖₛA_{ds}G_{ys}T_{ds}A_{ds}G_{ds}T_{ds} | 35 | 2346 |
| | | | | | | G_{ds}T_{ds}A_{ds}A_{ds}Gₖₛ^{m}CₖₛTₖ | | |
| 1341838 | 1022 | 1037 | 20837 | 20852 | CTTTGCAGCATTGATT | ^{m}CₖₛTₖₛTₖₛT_{ds}G_{ys}^{m}C_{ds}A_{ds}G_{ds} | 19 | 2463 |
| | | | | | | ^{m}C_{ds}A_{ds}T_{ds}T_{ds}G_{ds}AₖₛTₖₛTₖ | | |
| 1341841 | N/A | N/A | 11571 | 11586 | TCTTGACAATGGTTGA | Tₖₛ^{m}CₖₛTₖₛT_{ds}G_{ys}A_{ds}^{m}C_{ds}A_{ds} | 56 | 2440 |
| | | | | | | A_{ds}T_{ds}G_{ds}G_{ds}T_{ds}TₖₛGₖₛAₖ | | |
| 1341846 | N/A | N/A | 11855 | 11870 | TAAGCAGAATTGTGAA | TₖₛAₖₛAₖₛG_{ds}C_{ys}A_{ds}G_{ds}A_{ds}A_{ds} | 26 | 2361 |
| | | | | | | T_{ds}T_{ds}G_{ds}T_{ds}GₖₛAₖₛAₖ | | |
| 1341849 | N/A | N/A | 14194 | 14209 | TGTGATTGAGTTCTCC | TₖₛGₖₛTₖₛG_{ds}A_{ys}T_{ds}T_{ds}G_{ds}A_{ds} | 34 | 2020 |
| | | | | | | G_{ds}T_{ds}T_{ds}^{m}C_{ds}Tₖₛ^{m}Cₖₛ^{m}Cₖ | | |
| 1341852 | N/A | N/A | 12423 | 12438 | GGTGGTAACGGTGATC | GₖₛGₖₛTₖₛG_{ds}G_{ys}T_{ds}A_{ds}A_{ds}^{m}C_{ds} | 35 | 2591 |
| | | | | | | G_{ds}G_{ds}T_{ds}G_{ds}AₖₛTₖₛ^{m}Cₖ | | |
| 1341857 | N/A | N/A | 14204 | 14219 | CAGAUTATTATGTGAT | ^{m}CₖₛAₖₛGₖₛA_{ds}U_{ys}T_{ds}A_{ds}T_{ds}T_{ds} | 32 | 2877 |
| | | | | | | A_{ds}T_{ds}G_{ds}T_{ds}GₖₛAₖₛTₖ | | |
| 1341859 | N/A | N/A | 15491 | 15506 | TTAAUGCCACCCTACC | TₖₛTₖₛAₖₛA_{ds}U_{ys}G_{ds}^{m}C_{ds}^{m}C_{ds} | 8 | 2878 |
| | | | | | | A_{ds}^{m}C_{ds}^{m}C_{ds}^{m}C_{ds}T_{ds}Aₖₛ^{m}Cₖₛ^{m}Cₖ | | |
| 1341868 | N/A | N/A | 16282 | 16297 | TAGTCTTCAGCAAAGT | TₖₛAₖₛGₖₛT_{ds}C_{ys}T_{ds}T_{ds}^{m}C_{ds}A_{ds} | 41 | 2632 |
| | | | | | | G_{ds}^{m}C_{ds}A_{ds}AdSAₖₛGₖₛTₖ | | |
| 1341874 | N/A | N/A | 16131 | 16146 | GCTCCATAATAATAGC | Gₖₛ^{m}CₖₛTₖₛ^{m}C_{ds}C_{ys}A_{ds}T_{ds}A_{ds} | 16 | 2665 |
| | | | | | | A_{ds}T_{ds}A_{ds}A_{ds}T_{ds}AₖₛGₖₛ^{m}Cₖ | | |
| 1341880 | N/A | N/A | 17991 | 18006 | GTTAGTATAGTTATCT | GₖₛTₖₛTₖₛA_{ds}G_{ys}T_{ds}A_{ds}T_{ds}A_{ds} | 52 | 1171 |
| | | | | | | G_{ds}T_{ds}T_{ds}A_{ds}Tₖₛ^{m}CₖₛTₖ | | |
| 1341883 | N/A | N/A | 17996 | 18011 | ATGAAGTTAGTATAGT | AₖₛTₖₛGₖₛA_{ds}A_{ys}G_{ds}T_{ds}T_{ds}A_{ds} | 38 | 1483 |
| | | | | | | G_{ds}T_{ds}A_{ds}T_{ds}AₖₛGₖₛTₖ | | |
| 1341886 | N/A | N/A | 16377 | 16392 | ACCAAACTTCCAGCAG | Aₖₛ^{m}Cₖₛ^{m}CₖₛA_{ds}A_{ys}A_{ds}^{m}C_{ds}T_{ds} | 54 | 1948 |
| | | | | | | T_{ds}^{m}C_{ds}^{m}C_{ds}A_{ds}G_{ds}^{m}CₖₛAₖₛGₖ | | |
| 1341891 | N/A | N/A | 18097 | 18112 | GAAAUTGATACACCAA | GₖₛAₖₛAₖₛA_{ds}U_{ys}T_{ds}G_{ds}A_{ds}T_{ds} | 58 | 2879 |
| | | | | | | A_{ds}^{m}C_{ds}A_{ds}^{m}C_{ds}^{m}CₖₛAₖₛAₖ | | |
| 1341894 | N/A | N/A | 17986 | 18001 | TATAGTTATCTTCTCA | TₖₛAₖₛTₖₛA_{ds}G_{ys}T_{ds}T_{ds}A_{ds}T_{ds} | 33 | 2295 |
| | | | | | | ^{m}C_{ds}T_{ds}T_{ds}^{m}C_{ds}Tₖₛ^{m}CₖₛAₖ | | |
| 1341899 | N/A | N/A | 18695 | 18710 | AAAGACTTTGAGACTC | AₖₛAₖₛAₖₛG_{ds}A_{ys}^{m}C_{ds}T_{ds}T_{ds}T_{ds} | 76 | 1250 |
| | | | | | | G_{ds}A_{ds}G_{ds}A_{ds}^{m}CₖₛTₖₛ^{m}Cₖ | | |
| 1341901 | N/A | N/A | 19914 | 19929 | AGTGCATCTTAAGATA | AₖₛGₖₛTₖₛG_{ds}C_{ys}A_{ds}T_{ds}^{m}C_{ds}T_{ds} | 17 | 2130 |
| | | | | | | T_{ds}A_{ds}A_{ds}G_{ds}AₖₛTₖₛAₖ | | |
| 1341904 | 1081 | 1096 | 20896 | 20911 | CTGCUAGTGCCAAACC | ^{m}CₖₛTₖₛGₖₛ^{m}C_{ds}U_{ys}A_{ds}G_{ds}T_{ds} | 67 | 2880 |
| | | | | | | G_{ds}^{m}C_{ds}^{m}C_{ds}A_{ds}A_{ds}Aₖₛ^{m}Cₖₛ^{m}Cₖ | | |
| 1341915 | N/A | N/A | 19906 | 19921 | TTAAGATACCCAGGTT | TₖₛTₖₛAₖₛA_{ds}G_{ys}A_{ds}T_{ds}A_{ds}^{m}C_{ds} | 30 | 163 |
| | | | | | | ^{m}C_{ds}^{m}C_{ds}A_{ds}G_{ds}GₖₛTₖₛTₖ | | |
| 1341917 | N/A | N/A | 19910 | 19925 | CATCUTAAGATACCCA | ^{m}CₖₛAₖₛTₖₛ^{m}C_{ds}U_{ys}T_{ds}A_{ds}A_{ds} | 56 | 2881 |
| | | | | | | G_{ds}A_{ds}T_{ds}A_{ds}^{m}C_{ds}^{m}Cₖₛ^{m}CₖₛAₖ | | |
| 1341921 | N/A | N/A | 20116 | 20131 | CAGCATCAAGACATTC | ^{m}CₖₛAₖₛGₖₛ^{m}C_{ds}A_{ys}T_{ds}^{m}C_{ds}A_{ds} | 52 | 2191 |
| | | | | | | A_{ds}G_{ds}A_{ds}^{m}C_{ds}A_{ds}TₖₛTₖₛ^{m}Cₖ | | |
| 1341925 | N/A | N/A | 20009 | 20024 | AGAGAGTAATCAGTTT | AₖₛGₖₛAₖₛG_{ds}A_{ys}G_{ds}T_{ds}A_{ds}A_{ds} | 25 | 2651 |
| | | | | | | T_{ds}^{m}C_{ds}A_{ds}G_{ds}TₖₛTₖₛTₖ | | |
| 1341934 | N/A | N/A | 20192 | 20207 | GCAGUTATTAGAAGTC | Gₖₛ^{m}CₖₛAₖₛG_{ds}U_{ys}T_{ds}A_{ds}T_{ds}T_{ds} | 59 | 2882 |
| | | | | | | A_{ds}G_{ds}A_{ds}A_{ds}GₖₛTₖₛ^{m}Cₖ | | |
| 1341937 | 1077 | 1092 | 20892 | 20907 | TAGTGCCAAACCAATG | TₖₛAₖₛGₖₛT_{ds}G_{ys}^{m}C_{ds}^{m}C_{ds}A_{ds} | 55 | 1198 |
| | | | | | | A_{ds}A_{ds}^{m}C_{ds}^{m}C_{ds}A_{ds}AₖₛTₖₛGₖ | | |
| 1341939 | 1085 | 1100 | 20900 | 20915 | ACTGCTGCTAGTGCCA | Aₖₛ^{m}CₖₛTₖₛG_{ds}C_{ys}T_{ds}G_{ds}^{m}C_{ds} | 64 | 1821 |
| | | | | | | T_{ds}A_{ds}G_{ds}T_{ds}G_{ds}^{m}Cₖₛ^{m}CₖₛAₖ | | |
| 1341943 | N/A | N/A | 20486 | 20501 | AACTUCATAGTGGACT | AₖₛAₖₛ^{m}CₖₛT_{ds}U_{ys}^{m}C_{ds}A_{ds}T_{ds} | 38 | 2883 |
| | | | | | | A_{ds}G_{ds}T_{ds}G_{ds}G_{ds}Aₖₛ^{m}CₖₛTₖ | | |
| 1341945 | N/A | N/A | 20422 | 20437 | ACAGUAAAATTATGCC | Aₖₛ^{m}CₖₛAₖₛG_{ds}U_{ys}A_{ds}A_{ds}A_{ds} | 24 | 2884 |
| | | | | | | A_{ds}T_{ds}T_{ds}A_{ds}T_{ds}Gₖₛ^{m}Cₖₛ^{m}Cₖ | | |
| 1341947 | N/A | N/A | 20381 | 20396 | AATCACAAGTAAGGTA | AₖₛAₖₛTₖₛ^{m}C_{ds}A_{ys}mC_{ds}A_{ds}A_{ds} | 31 | 1333 |
| | | | | | | G_{ds}T_{ds}A_{ds}A_{ds}G_{ds}GₖₛTₖₛAₖ | | |
| 1341954 | N/A | N/A | 12501 | 12516 | GCAGAAATTCACCTTG | Gₖₛ^{m}CₖₛAₖₛG_{ds}A_{ys}A_{ds}A_{ds}T_{ds}T_{ds} | 54 | 1002 |
| | | | | | | ^{m}C_{ds}A_{ds}^{m}C_{ds}^{m}C_{ds}TₖₛTₖₛGₖ | | |

TABLE 49
Inhibition of HSD17B13 RNA by modified oligonucleotides targeting SEQ ID NO.: 1, and 2

| | SEQ ID | SEQ ID | SEQ ID | SEQ ID | | | | |
|---|---|---|---|---|---|---|---|---|
| | NO: 1 | NO: 1 | NO: 2 | NO: 2 | | | | SEQ |
| Compound | Start | Stop | Start | Stop | Sequence | Chemistry Notation | % | ID |
| Number | Site | Site | Site | Site | (5′ to 3′) | (5′ to 3′) | inhibition | NO |
| 1245927 | N/A | N/A | 3433 | 3448 | AGTAGATGGTAAGTCA | AₖₛGₖₛTₖₛA_{ds}G_{ds}A_{ds}T_{ds}G_{ds}G_{ds} | 86 | 121 |
| | | | | | | T_{ds}A_{ds}A_{ds}G_{ds}Tₖₛ^{m}CₖₛAₖ | | |
| 1246023 | N/A | N/A | 5046 | 5061 | GAGTGAATCATTCAGT | GₖₛAₖₛGₖₛT_{ds}G_{ds}A_{ds}A_{ds}T_{ds}^{m}C_{ds} | 82 | 1526 |
| | | | | | | A_{ds}T_{ds}T_{ds}^{m}C_{ds}AₖₛGₖₛTₖ | | |
| 1341508 | N/A | N/A | 14189 | 14204 | TTGAGTTCTCCACTGC | TₖₛTₖₛGₖₛA_{ds}G_{ds}T_{ds}T_{ds}^{m}C_{ds}T_{ds} | 26 | 2885 |
| | | | | | | ^{m}C_{ds}^{m}C_{ds}A_{ds}^{m}CₖₛTₖₛGₖₛ^{m}Cₑ | | |
| 1341518 | 1251 | 1266 | 21066 | 21081 | TGTCCACCTTTAAATG | TₖₛGₖₛTₖₛ^{m}C_{ds}^{m}C_{ds}A_{ds}^{m}C_{ds}^{m}C_{ds}T_{ds} | 28 | 1666 |
| | | | | | | T_{ds}T_{ds}A_{ds}AₖₛAₖₛTₖgGₑ | | |
| 1341519 | 1310 | 1325 | 21125 | 21140 | CTTAAACCTTCCCTGT | ^{m}CₖₛTₖₛTₖₛA_{ds}A_{ds}A_{ds}^{m}C_{ds}^{m}C_{ds} | 34 | 1823 |
| | | | | | | T_{ds}T_{ds}^{m}C_{ds}^{m}C_{ds}^{m}CₖₛTₖₛGₖₛTₑ | | |
| 1341520 | 1328 | 1343 | 21143 | 21158 | GAATGCTACTTGAACA | GₖₛAₖₛAₖₛT_{ds}G_{ds}^{m}C_{dS}T_{ds}A_{ds} | 56 | 1123 |
| | | | | | | ^{m}C_{ds}T_{ds}T_{ds}G_{ds}AₖₛAₖₛ^{m}CₖₛAₑ | | |
| 1341521 | 1330 | 1345 | 21145 | 21160 | TGGAATGCTACTTGAA | TₖₛGₖₛGₖₛA_{ds}A_{ds}T_{ds}G_{ds}^{m}C_{ds}T_{ds} | 57 | 2203 |
| | | | | | | A_{ds}^{m}C_{ds}T_{ds}TₖₛGₖₛAₖₛAₑ | | |
| 1341522 | 1320 | 1335 | 21135 | 21150 | CTTGAACAGTCTTAAA | ^{m}CₖₛTₖₛTₖₛG_{ds}A_{ds}A_{ds}^{m}C_{ds}A_{ds} | 43 | 500 |
| | | | | | | G_{ds}T_{ds}^{m}C_{ds}T_{ds}TₖₛAₖₛAₖₛAₑ | | |
| 1341523 | 1309 | 1324 | 21124 | 21139 | TTAAACCTTCCCTGTG | TₖₛTₖₛAₖₛA_{dS}A_{ds}^{m}C_{ds}^{m}C_{ds}T_{ds} | 18 | 2807 |
| | | | | | | T_{ds}^{m}C_{ds}^{m}C_{ds}^{m}C_{ds}TₖₛGₖₛTₖₛGₑ | | |
| 1341524 | 1319 | 1334 | 21134 | 21149 | TTGAACAGTCTTAAAC | TₖₛTₖₛGₖₛA_{ds}A_{ds}^{m}C_{ds}A_{ds}G_{ds}T_{ds} | 35 | 422 |
| | | | | | | ^{m}C_{ds}T_{ds}T_{ds}AₖₛAₖₛAₖₛ^{m}Cₑ | | |
| 1341525 | 1264 | 1279 | 21079 | 21094 | GGGAGGTAGCTTTTGT | GₖₛGₖₛGₖₛA_{ds}G_{ds}G_{ds}T_{ds}A_{dS}G_{ds} | 40 | 343 |
| | | | | | | ^{m}C_{ds}T_{ds}T_{ds}TₖₛTₖₛGₖₛTₑ | | |
| 1341526 | 1308 | 1323 | 21123 | 21138 | TAAACCTTCCCTGTGT | TₖₛAₖₛAₖₛA_{ds}^{m}C_{ds}^{m}C_{dS}T_{ds}T_{ds} | 23 | 1745 |
| | | | | | | ^{m}C_{ds}^{m}C_{ds}^{m}C_{ds}T_{ds}GₖₛTₖₛGₖₛTₑ | | |
| 1341527 | 1175 | 1190 | 20990 | 21005 | TAAGAGGCATGAAAGG | TₖₛAₖₛAₖₛG_{ds}A_{ds}G_{ds}G_{ds}^{m}C_{ds}A_{ds} | 36 | 2751 |
| | | | | | | T_{ds}G_{ds}A_{ds}AₖₛAₖₛGₖₛGₑ | | |
| 1341530 | 693 | 708 | 12111 | 12126 | ATGAGGTTTTGATACC | AₖₛT_{kS}GₖₛA_{ds}G_{ds}G_{ds}T_{ds}T_{ds}T_{ds} | 20 | 569 |
| | | | | | | T_{ds}G_{ds}A_{ds}TₖₛAₖₛ^{m}Cₖₛ^{m}Cₑ | | |
| 1341531 | 1336 | 1351 | 21151 | 21166 | ACAGATTGGAATGCTA | Aₖₛ^{m}CₖₛAₖₛG_{ds}A_{ds}T_{dS}T_{ds}G_{ds}G_{ds} | 68 | 1668 |
| | | | | | | A_{ds}A_{ds}T_{ds}Gₖₛ^{m}CₖₛTₖₛAₑ | | |
| 1341557 | 1347 | 1362 | 21162 | 21177 | GTGGCATGGCTACAGA | GₖₛTₖₛGₖₛG_{ds}^{m}C_{ds}A_{ds}T_{ds}G_{ds}G_{ds} | 38 | 501 |
| | | | | | | ^{m}C_{ds}T_{ds}A_{ds}^{m}CₖₛAₖₛGₖₛAₑ | | |
| 1341561 | 1346 | 1361 | 21161 | 21176 | TGGCATGGCTACAGAT | TₖₛGₖₛGₖₛ^{m}C_{ds}A_{ds}T_{ds}G_{ds}G_{ds} | 68 | 423 |
| | | | | | | ^{m}C_{ds}T_{ds}A_{ds}^{m}C_{ds}AₖₛGₖₛAₖₛTₑ | | |
| 1341573 | 1348 | 1363 | 21163 | 21178 | TGTGGCATGGCTACAG | TₖₛGₖₛTₖₛG_{ds}G_{ds}^{m}C_{ds}A_{ds}T_{ds}G_{ds} | 25 | 579 |
| | | | | | | G_{ds}^{m}C_{ds}T_{ds}Aₖₛ^{m}CₖₛAₖₛGₑ | | |
| 1341576 | 801 | 816 | 15682 | 15697 | GTATTCCATCTATCAG | GₖₛTₖₛAₖₛT_{ds}T_{ds}^{m}C_{ds}^{m}C_{ds}A_{ds} | 51 | 727 |
| | | | | | | T_{ds}^{m}C_{ds}T_{ds}A_{ds}Tₖₛ^{m}CₖₛAₖₛGₑ | | |
| 1341608 | N/A | N/A | 19914 | 19929 | AGTGCATCTTAAGATA | AₖₛGₖₛT_{ds}G_{ds}^{m}C_{ds}A_{ds}T_{ds}^{m}C_{ds} | 27 | 2130 |
| | | | | | | T_{ds}T_{ds}A_{ds}AₖₛGₑₛAₖₛTₑₛAₖ | | |
| 1341610 | N/A | N/A | 19915 | 19930 | GAGTGCATCTTAAGAT | GₖₛAₖₛG_{ds}T_{dS}G_{ds}^{m}C_{ds}A_{ds}T_{ds} | 27 | 2256 |
| | | | | | | ^{m}C_{ds}T_{ds}T_{ds}AₖₛAₑₛGₖₛAₑₛTₖ | | |
| 1341611 | N/A | N/A | 18690 | 18705 | CTTTGAGACTCTTGTT | ^{m}CₖₛTₖₛT_{ds}T_{ds}G_{ds}A_{dS}G_{ds}A_{ds} | 42 | 2583 |
| | | | | | | ^{m}C_{ds}T_{ds}^{m}C_{ds}TₖₛTₑₛGₖₛTₑₛTₖ | | |
| 1341612 | N/A | N/A | 19904 | 19919 | AAGATACCCAGGTTGC | AₖₛAₖₛG_{ds}A_{ds}T_{ds}A_{ds}^{m}C_{ds}^{m}C_{ds} | 59 | 2712 |
| | | | | | | ^{m}C_{ds}A_{ds}G_{ds}GₖₛTₑₛTₖₛGₑₛ^{m}Cₖ | | |
| 1341613 | N/A | N/A | 18092 | 18107 | TGATACACCAATGCAG | TₖₛGₖₛA_{ds}T_{ds}A_{ds}^{m}C_{ds}A_{ds}^{m}C_{ds} | 62 | 2370 |
| | | | | | | ^{m}C_{ds}A_{ds}A_{ds}TₖₛGₑₛ^{m}CₖₛAₑₛGₖ | | |
| 1341618 | N/A | N/A | 19906 | 19921 | TTAAGATACCCAGGTT | TₖₛTₖₛA_{ds}A_{ds}G_{ds}A_{ds}TcₛA_{ds}^{m}C_{ds} | 48 | 163 |
| | | | | | | ^{m}C_{ds}^{m}C_{ds}AₖₛGₑₛGₖₛTₑₛTₖ | | |
| 1341619 | N/A | N/A | 20388 | 20403 | CTATAGTAATCACAAG | ^{m}CₖₛTₖₛA_{ds}T_{ds}A_{ds}G_{ds}T_{ds}A_{ds}A_{ds} | 36 | 1644 |
| | | | | | | T_{ds}^{m}C_{ds}Aₖₛ^{m}CₑₛAₖₛAₑₛGₖ | | |
| 1341620 | N/A | N/A | 20187 | 20202 | TATTAGAAGTCAGCCC | TₖₛAₖₛT_{ds}T_{ds}A_{ds}G_{ds}A_{ds}A_{ds}G_{ds} | 36 | 164 |
| | | | | | | T_{ds}^{m}C_{ds}AₖₛGₑₛ^{m}Cₖₛ^{m}Cₑₛ^{m}Cₖ | | |
| 1341621 | N/A | N/A | 20109 | 20124 | AAGACATTCTAGCCTG | AₖₛAₖₛG_{ds}A_{ds}^{m}C_{ds}A_{dS}T_{dS}T_{ds} | 25 | 2744 |
| | | | | | | ^{m}C_{ds}T_{ds}A_{ds}Gₖₛ^{m}Cₑₛ^{m}CₖₛTₑₛGₖ | | |
| 1341622 | N/A | N/A | 20197 | 20212 | ACATTGCAGTTATTAG | Aₖₛ^{m}CₖₛA_{ds}T_{ds}T_{ds}G_{ds}^{m}C_{ds}A_{ds} | 46 | 2309 |
| | | | | | | G_{ds}T_{ds}T_{ds}AₖₛTₑₛTₖₛAₑₛGₖ | | |
| 1341623 | N/A | N/A | 20119 | 20134 | TTACAGCATCAAGACA | TₖₛTₖₛA_{ds}^{m}C_{ds}A_{ds}G_{ds}^{m}C_{ds}A_{ds} | 22 | 2409 |
| | | | | | | T_{ds}^{m}C_{ds}A_{ds}AₖₛGₑₛAₖₛ^{m}CₑₛAₖ | | |
| 1341624 | N/A | N/A | 19916 | 19931 | GGAGTGCATCTTAAGA | GₖₛGₖₛA_{ds}G_{ds}T_{ds}G_{ds}^{m}C_{ds}A_{ds}T_{ds} | 34 | 2810 |
| | | | | | | ^{m}C_{ds}T_{ds}TₖₛAₑₛAₖₛGₑₛAₖ | | |
| 1341625 | N/A | N/A | 20009 | 2<X>24 | AGAGAGTAATCAGTTT | AₖₛGₖₛA_{ds}G_{ds}A_{ds}G_{ds}T_{ds}A_{ds}A_{ds} | 52 | 2651 |
| | | | | | | T_{ds}^{m}C_{ds}AₖₛGₑₛTₖₛTₑₛTₖ | | |
| 1341626 | N/A | N/A | 19905 | 19920 | TAAGATACCCAGGTTG | TₖₛAₖₛA_{ds}G_{ds}A_{ds}T_{ds}A_{ds}^{m}C_{ds} | 30 | 2790 |
| | | | | | | ^{m}C_{ds}^{m}C_{ds}A_{ds}GₖₛGₑₛTₖₛTₑₛGₖ | | |
| 1341627 | N/A | N/A | 19999 | 20014 | CAGTTTTCCTCATGAT | ^{m}CₖₛAₖₛG_{ds}T_{ds}T_{ds}T_{ds}T_{ds}^{m}C_{ds} | 59 | 2331 |
| | | | | | | ^{m}C_{ds}T_{ds}^{m}C_{ds}AₖₛTₑₛGₖₛAₑₛTₖ | | |
| 1341628 | N/A | N/A | 20378 | 20393 | CACAAGTAAGGTAAAG | ^{m}CₖₛAₖₛ^{m}C_{ds}A_{dS}A_{ds}G_{ds}T_{ds}A_{ds} | 38 | 2448 |
| | | | | | | A_{ds}G_{ds}G_{ds}TₖₛAₑₛAₖₛAₑₛGₖ | | |
| 1341629 | N/A | N/A | 12804 | 12819 | CTCAGGCTGTAAGAGT | ^{m}CₖₛT_{kS}^{m}C_{ds}A_{dS}G_{ds}G_{ds}^{m}C_{ds}T_{ds} | 10 | 2240 |
| | | | | | | G_{ds}T_{ds}A_{ds}AₖₛGcₛAₖₛGₑₛTₖ | | |
| 1341630 | N/A | N/A | 14165 | 14180 | GCAAGCCAACAGAGAG | Gₖₛ^{m}CₖₛA_{ds}A_{ds}G_{ds}^{m}C_{ds}^{m}C_{ds}A_{ds} | 12 | 2556 |
| | | | | | | A_{ds}^{m}C_{ds}A_{ds}GₖₛAₑₛGₖₛAₑₛGₖ | | |
| 1341631 | N/A | N/A | 14175 | 14190 | GCCTTGAATAGCAAGC | Gₖₛ^{m}Cₖₛ^{m}C_{ds}T_{ds}T_{ds}G_{ds}A_{ds}A_{ds} | 16 | 2063 |
| | | | | | | T_{ds}A_{ds}G_{ds}^{m}CₖₛAₑₛAₖₛGₑₛ^{m}Cₖ | | |
| 1341632 | N/A | N/A | 13959 | 13974 | GTCTACCTCTAAGTTA | GₖₛTₖₛ^{m}C_{ds}T_{ds}A_{ds}^{m}C_{ds}^{m}C_{ds}T_{ds} | 15 | 2363 |
| | | | | | | ^{m}C_{ds}T_{ds}A_{ds}AₖₛGₑₛTₖₛTₑₛAₖ | | |
| 1341633 | N/A | N/A | 13949 | 13964 | AAGTTAGCCCCCAGGA | AₖₛAₖₛG_{ds}T_{ds}T_{ds}A_{ds}G_{ds}^{m}C_{ds} | 12 | 2811 |
| | | | | | | ^{m}C_{ds}^{m}C_{ds}^{m}C_{ds}^{m}CₖₛAₑₛGₖₛGₑₛAₖ | | |
| 1341634 | N/A | N/A | 12496 | 12511 | AATTCACCTTGACTAA | AₖₛAₖₛT_{ds}T_{ds}^{m}C_{ds}A_{ds}^{m}C_{ds}^{m}C_{ds} | 9 | 2144 |
| | | | | | | T_{ds}T_{ds}G_{ds}Aₖₛ^{m}CₑₛTₖₛAₑₛAₖ | | |
| 1341635 | N/A | N/A | 20479 | 20494 | TAGTGGACTTCATTAG | TₖₛAₖₛG_{ds}T_{ds}G_{ds}G_{ds}A_{ds}^{m}C_{dS}T_{ds} | 41 | 2351 |
| | | | | | | T_{ds}^{m}C_{ds}AₖₛTₑₛTₖₛAₑₛGₖ | | |
| 1341636 | N/A | N/A | 20489 | 20504 | CATAACTTCATAGTGG | ^{m}CₖₛAₖₛT_{ds}A_{ds}A_{ds}^{m}C_{ds}T_{ds}T_{ds} | 15 | 866 |
| | | | | | | ^{m}C_{ds}A_{ds}T_{ds}AₖₛGₑₛTₖₛGₑₛGₖ | | |
| 1341637 | N/A | N/A | 12794 | 12809 | AAGAGTCAGTATCCTC | AₖₛAₖₛG_{ds}A_{ds}G_{ds}T_{ds}^{m}C_{ds}A_{ds}G_{ds} | 14 | 2572 |
| | | | | | | T_{ds}A_{ds}Tₖₛ^{m}Cₑₛ^{m}CₖₛTₑₛ^{m}Cₖ | | |
| 1341638 | 1394 | 1409 | 21209 | 21224 | CTTGATCTCTTAGCTG | ^{m}CₖₛT_{kS}TₖₛG_{ds}A_{ds}T_{ds}^{m}C_{ds}T_{ds} | 36 | 736 |
| | | | | | | ^{m}C_{ds}T_{ds}T_{ds}A_{ds}Gₖₛ^{m}CₖₛTₖₛGₑ | | |
| 1341639 | 1416 | 1431 | 21231 | 21246 | GAGATAAAGCTGCCTG | GₖₛAₖₛGₖₛA_{dS}T_{ds}A_{ds}A_{ds}A_{ds}G_{ds} | 55 | 1592 |
| | | | | | | ^{m}C_{ds}T_{ds}G_{ds}^{m}Cₖₛ^{m}CₖₛTₖₛGₑ | | |
| 1341640 | 1426 | 1441 | 21241 | 21256 | TGTCCAGGTTGAGATA | TₖₛGₖₛTₖₛ^{m}C_{ds}^{m}C_{ds}A_{ds}G_{ds}G_{ds} | 45 | 191 |
| | | | | | | T_{ds}T_{ds}G_{ds}A_{ds}GₖₛAₖₛTₖₛAₑ | | |
| 1341641 | 1415 | 1430 | 21230 | 21245 | AGATAAAGCTGCCTGC | AₖₛGₖₛAₖₛT_{ds}A_{ds}A_{ds}A_{ds}G_{ds}^{m}C_{ds} | 44 | 1515 |
| | | | | | | T_{ds}G_{ds}^{m}C_{ds}^{m}CₖₛTₖₛGₖₛ^{m}Cₑ | | |
| 1341642 | 1425 | 1440 | 21240 | 21255 | GTCCAGGTTGAGATAA | GₖₛT_{kS}^{m}Cₖₛ^{m}C_{ds}A_{ds}G_{ds}G_{ds}T_{ds} | 52 | 113 |
| | | | | | | T_{ds}G_{ds}A_{ds}G_{ds}AₖₛTₖₛAₖₛAₑ | | |
| 1341643 | 791 | 806 | 15672 | 15687 | TATCAGACTTCTTACG | TₖₛAₖₛTₖₛ^{m}C_{ds}A_{ds}G_{ds}A_{ds}^{m}C_{ds} | 28 | 103 |
| | | | | | | T_{ds}T_{ds}^{m}C_{ds}T_{ds}TₖₛAₖₛ^{m}CₖₛGₑ | | |
| 1341644 | 1398 | 1413 | 21213 | 21228 | GAAACTTGATCTCTTA | GₖₛAₖₛAₖₛA_{ds}^{m}C_{ds}T_{ds}T_{ds}G_{ds}A_{ds} | 79 | 2717 |
| | | | | | | T_{ds}^{m}C_{ds}T_{ds}^{m}CₖₛTₖₛTₖₛAₑ | | |
| 1341645 | 1388 | 1403 | 21203 | 21218 | CTCTTAGCTGTGCACT | ^{m}CₖₛTₖₛ^{m}CₖₛT_{ds}T_{ds}A_{ds}G_{ds}^{m}C_{ds} | 66 | 268 |
| | | | | | | T_{ds}G_{ds}T_{ds}G_{ds}^{m}CₖₛAₖₛ^{m}CₖₛTₑ | | |
| 1341646 | 1384 | 1399 | 21199 | 21214 | TAGCTGTGCACTCATT | TₖₛAₖₛGₖₛ^{m}C_{ds}T_{ds}G_{ds}T_{ds}G_{ds} | 66 | 1981 |
| | | | | | | ^{m}C_{ds}A_{ds}^{m}C_{ds}T_{ds}^{m}CₖₛAₖₛTₖₛTₑ | | |
| 1341647 | N/A | N/A | 14189 | 14204 | TTGAGTTCTCCACTGC | TₖₛTₖₛG_{ds}A_{ds}G_{ds}T_{ds}T_{ds}^{m}C_{ds}T_{ds} | 20 | 2885 |
| | | | | | | ^{m}C_{ds}^{m}C_{ds}Aₖₛ^{m}CₑₛTₖₛGₑₛ^{m}Cₖ | | |
| 1341949 | N/A | N/A | 12799 | 12814 | GCTGUAAGAGTCAGTA | Gₖₛ^{m}CₖₛTₖₛG_{ds}U_{ys}A_{ds}A_{ds}G_{ds}A_{ds} | 28 | 2886 |
| | | | | | | G_{ds}T_{ds}^{m}C_{ds}A_{ds}GₖₛTₖₛAₖ | | |
| 1341950 | 1088 | 1103 | 20903 | 20918 | TTGACTGCTGCTAGTG | TₖₛTₖₛGₖₛA_{ds}C_{ys}T_{ds}G_{ds}^{m}C_{ds}T_{ds} | 40 | 28 |
| | | | | | | G_{ds}^{m}C_{ds}T_{ds}A_{dS}GₖₛTₖₛGₖ | | |
| 1341958 | N/A | N/A | 12797 | 12812 | TGTAAGAGTCAGTATC | TₖₛGₖₛTₖₛA_{ds}A_{ys}G_{ds}A_{ds}G_{ds}T_{ds} | 29 | 2652 |
| | | | | | | ^{m}C_{ds}A_{ds}G_{ds}T_{ds}AₖₛTₖₛ^{m}Cₖ | | |
| 1341959 | 1091 | 1106 | 20906 | 20921 | CGTTUGACTGCTGCTA | ^{m}CₖₛGₖₛTₖₛT_{ds}U_{ys}G_{ds}A_{ds}^{m}C_{ds} | 54 | 2887 |
| | | | | | | T_{ds}G_{ds}^{m}C_{ds}T_{ds}G_{ds}^{m}CₖₛTₖₛAₖ | | |
| 1341960 | N/A | N/A | 14172 | 14187 | TTGAATAGCAAGCCAA | TₖₛTₖₛGₖₛA_{ds}A_{ys}T_{ds}A_{ds}G_{ds}^{m}C_{ds} | 30 | 1864 |
| | | | | | | A_{ds}A_{ds}G_{ds}^{m}C_{ds}^{m}CₖₛAₖₛAₖ | | |
| 1341961 | N/A | N/A | 14175 | 14190 | GCCTUGAATAGCAAGC | Gₖₛ^{m}Cₖₛ^{m}CₖₛT_{ds}U_{ys}G_{ds}A_{ds}A_{ds} | 12 | 2888 |
| | | | | | | T_{ds}A_{ds}G_{ds}^{m}C_{ds}A_{ds}AₖₛGₖₛ^{m}Cₖ | | |
| 1341962 | N/A | N/A | 13949 | 13964 | AAGTUAGCCCCCAGGA | AₖₛAₖₛGₖₛT_{ds}U_{yS}A_{dS}G_{ds}^{m}C_{ds} | 0 | 2889 |
| | | | | | | ^{m}C_{ds}^{m}C_{ds}^{m}C_{ds}^{m}C_{ds}A_{ds}GₖₛGₖₛAₖ | | |
| 1341963 | N/A | N/A | 13952 | 13967 | TCTAAGTTAGCCCCCA | Tₖₛ^{m}CₖₛTₖₛA_{ds}A_{ys}G_{ds}T_{d}gT_{ds}A_{ds} | 7 | 928 |
| | | | | | | G_{ds}^{m}C_{ds}^{m}C_{ds}^{m}C_{ds}^{m}Cₖₛ^{m}CₖₛAₖ | | |
| 1341964 | N/A | N/A | 13956 | 13971 | TACCUCTAAGTTAGCC | TₖₛAₖₛTₖₛ^{m}C_{ds}U_{ys}^{m}C_{ds}T_{ds}A_{ds} | 13 | 2890 |
| | | | | | | A_{ds}G_{ds}T_{ds}T_{ds}A_{ds}Gₖₛ^{m}Cₖₛ^{m}Cₖ | | |
| 1341965 | N/A | N/A | 13954 | 13969 | CCTCUAAGTTAGCCCC | ^{m}Cₖₛ^{m}CₖₛTₖₛ^{m}C_{ds}U_{ys}A_{ds}A_{ds}G_{ds} | 8 | 2891 |
| | | | | | | T_{ds}T_{ds}A_{ds}G_{ds}^{m}C_{ds}^{m}Cₖₛ^{m}Cₖₛ^{m}Cₖ | | |
| 1341966 | N/A | N/A | 13959 | 13974 | GTCTACCTCTAAGTTA | GₖₛTₖₛ^{m}CₖₛT_{ds}A_{ys}^{m}C_{ds}^{m}C_{ds}T_{ds} | 15 | 2363 |
| | | | | | | ^{m}C_{ds}T_{ds}A_{ds}A_{ds}G_{ds}TₖₛTₖₛAₖ | | |
| 1341967 | N/A | N/A | 12794 | 12809 | AAGAGTCAGTATCCTC | AₖₛAₖₛGₖₛA_{ds}GvₛT_{ds}^{m}C_{ds}A_{ds}G_{ds} | 55 | 2572 |
| | | | | | | T_{ds}A_{ds}T_{ds}^{m}C_{ds}^{m}CₖₛTₖₛ^{m}Cₖ | | |
| 1341968 | 1202 | 1217 | 21017 | 21032 | GTATGTTTATGTAAGC | G_{kS}TₖₛAₖₛT_{ds}G_{ys}T_{dS}T_{ds}T_{ds}A_{ds} | 66 | 1511 |
| | | | | | | T_{ds}G_{ds}T_{ds}A_{ds}AₖₛGₖₛ^{m}Cₖ | | |
| 1341969 | 1200 | 1215 | 21015 | 21030 | ATGTUTATGTAAGCAC | AₖₛTₖₛGₖₛT_{ds}U_{ys}T_{ds}A_{ds}T_{ds}G_{ds} | 45 | 2892 |
| | | | | | | T_{ds}A_{ds}A_{ds}G_{ds}^{m}CₖₛAₖₛ^{m}Cₖ | | |
| 1341970 | N/A | N/A | 14168 | 14183 | ATAGCAAGCCAACAGA | AₖₛTₖₛAₖₛG_{ds}C_{ys}A_{ds}A_{ds}G_{ds}^{m}C_{ds} | 1 | 2633 |
| | | | | | | ^{m}C_{ds}A_{ds}A_{ds}^{m}C_{ds}AₖₛGₖₛAₖ | | |
| 1341971 | 606 | 621 | 10492 | 10507 | AATAUGGGATGAGGTA | AₖₛAₖₛTₖₛA_{ds}U_{ys}G_{ds}G_{ds}G_{ds}A_{ds} | 38 | 2893 |
| | | | | | | T_{ds}G_{ds}A_{ds}G_{ds}GₖₛTₖₛAₖ | | |
| 1341972 | 1175 | 1190 | 20990 | 21005 | TAAGAGGCATGAAAGG | TₖₛAₖₛAₖₛG_{ds}A_{ys}G_{ds}G_{ds}^{m}C_{ds}A_{ds} | 50 | 2751 |
| | | | | | | T_{ds}G_{ds}A_{ds}A_{ds}AₖₛGₖₛGₖ | | |
| 1341973 | 1180 | 1195 | 20995 | 21010 | GTTTUTAAGAGGCATG | GₖₛT_{kS}TₖₛT_{ds}U_{ys}T_{ds}A_{ds}A_{ds}G_{ds} | 38 | 2894 |
| | | | | | | A_{ds}G_{ds}G_{ds}^{m}C_{ds}AₖₛTₖₛGₖ | | |
| 1341974 | N/A | N/A | 14165 | 14180 | GCAAGCCAACAGAGAG | Gₖₛ^{m}CₖₛAₖₛA_{ds}G_{ys}^{m}C_{ds}^{m}C_{ds}A_{ds} | 26 | 2556 |
| | | | | | | A_{ds}^{m}C_{ds}A_{ds}G_{ds}A_{ds}GₖₛAₖₛGₖ | | |
| 1341975 | N/A | N/A | 14170 | 14185 | GAATAGCAAGCCAACA | GₖₛAₖₛAₖₛT_{ds}A_{ys}G_{ds}^{m}C_{ds}A_{ds}A_{ds} | 23 | 1708 |
| | | | | | | G_{ds}^{m}C_{ds}^{m}C_{ds}A_{ds}Aₖₛ^{m}CₖₛAₖ | | |
| 1341976 | N/A | N/A | 14192 | 14207 | TGATUGAGTTCTCCAC | TₖₛGₖₛAₖₛT_{ds}U_{ys}G_{ds}A_{ds}G_{ds}T_{ds} | 4 | 2895 |
| | | | | | | T_{ds}^{m}C_{ds}T_{ds}^{m}C_{ds}^{m}CₖₛAₖₛ^{m}Cₖ | | |
| 1341977 | N/A | N/A | 14189 | 14204 | TTGAGTTCTCCACTGC | TₖₛTₖₛGₖₛA_{ds}G_{ys}T_{ds}T_{ds}^{m}C_{ds}T_{ds} | 18 | 2885 |
| | | | | | | ^{m}C_{ds}^{m}C_{ds}A_{ds}^{m}C_{ds}TₖₛGₖₛ^{m}Cₖ | | |
| 1341978 | 1261 | 1276 | 21076 | 21091 | AGGTAGCTTTTGTCCA | AₖₛGₖₛGₖₛT_{ds}A_{ys}G_{ds}^{m}C_{ds}T_{ds}T_{ds} | 59 | 109 |
| | | | | | | T_{ds}T_{ds}G_{ds}T_{ds}^{m}Cₖₛ^{m}CₖₛAₖ | | |
| 1341979 | 1259 | 1274 | 21074 | 21089 | GTAGCTTTTGTCCACC | GₖₛTₖₛAₖₛG_{ds}C_{ys}T_{ds}T_{ds}T_{ds}T_{ds} | 64 | 1978 |
| | | | | | | G_{ds}T_{ds}^{m}C_{ds}^{m}C_{ds}A_{kS}^{m}Cₖₛ^{m}Cₖ | | |
| 1341980 | 1258 | 1273 | 21073 | 21088 | TAGCUTTTGTCCACCT | TₖₛAₖₛGₖₛ^{m}C_{ds}U_{ys}T_{ds}T_{ds}T_{ds}G_{ds} | 67 | 2896 |
| | | | | | | T_{ds}^{m}C_{ds}^{m}C_{ds}A_{ds}^{m}Cₖₛ^{m}CₖₛTₖ | | |

### Example 4: Design of and Antisense Inhibition by Human HSD17B13 Modified Oligonucleotides in HepRG Cells

[0524] Modified oligonucleotides complementary to an HSD17B13 nucleic acid were synthesized and tested for their effect on HSD17B13 RNA levels in vitro. specifies the chemistry of each modified oligonucleotide; wherein subscript ‘d’ represents a 2′-β-D-deoxyribosyl sugar moiety, subscript ‘e’ represents a 2′-MOE sugar moiety, subscript ‘y’ represents a 2′-O-methyl sugar moiety, subscript ‘k’ represents a cEt modified sugar moiety, subscript ‘s’ represents a phosphorothioate internucleoside linkage, and superscript ‘m’ before the cytosine residue represents a 5-methyl cytosine. “Start site” indicates the 5′-most nucleoside of the target sequence to which the modified oligonucleotide is complementary. “Stop site” indicates the 3′-most nucleoside of the target sequence to which the modified oligonucleotide is complementary. As shown in the Tables below, the modified oligonucleotide are complementary to either the human HSD17B13 mRNA, designated herein as SEQ ID NO: 1 (GENBANK Accession No. NM_178135.4) or to the human HSD17B13 genomic sequence, designated herein as SEQ ID NO: 2 (the complement of GENBANK Accession No. NC_000004.12 truncated from nucleotides 87301001 to 87326000) or to both. ‘N/A’ indicates that the modified oligonucleotide is not complementary to that particular target sequence with 100% complementarity.

[0525] The modified oligonucleotides were tested in a series of experiments using the same culture conditions. The results for each experiment are presented in separate tables shown below. Cultured HepaRG cells at a density of 30,000 cells per well were transfected using electroporation with 1,000 nM of modified oligonucleotide. After a treatment period of approximately 24 hours, RNA was isolated from the cells and HSD17B13 RNA levels were measured by quantitative real-time RTPCR. Human primer probe set RTS43553 was used to measure RNA levels. HSD17B13 RNA levels were adjusted according to total RNA content, as measured by RIBOGREEN®. Results are presented as percent inhibition of HSD17B13 relative to untreated control cells. As used herein, a value of ‘0’ indicates that treatment with the modified oligonucleotide did not inhibit HSD17B13 mRNA levels.

TABLE 50
Inhibition of HSD17B13 RNA by modified oligonucleotides
targeting SEQ ID NO.: 1, and 2

| | SEQ ID | SEQ ID | SEQ ID | SEQ ID | | | | |
|---|---|---|---|---|---|---|---|---|
| | NO: 1 | NO: 1 | NO: 2 | NO: 2 | | | | SEQ |
| Compound | Start | Stop | Start | Stop | Sequence | Chemistry Notation | % | ID |
| Number | Site | Site | Site | Site | (5′ to 3′) | (5′ to 3′) | inhibition | NO |
| 1245927 | N/A | N/A | 3433 | 3448 | AGTAGATGGTAAGTCA | AₖₛGₖₛTₖₛA_{ds}G_{ds}A_{ds}T_{ds} | 81 | 121 |
| | | | | | | G_{ds}G_{ds}T_{ds}A_{ds}A_{ds}G_{ds}Tₖₛ | | |
| | | | | | | ^{m}CₖₛAₖ | | |
| 1246023 | N/A | N/A | 5046 | 5061 | GAGTGAATCATTCAGT | GₖₛAₖₛGₖₛT_{ds}G_{ds}A_{ds}A_{ds} | 83 | 1526 |
| | | | | | | T_{ds}^{m}C_{ds}A_{ds}T_{ds}T_{ds}^{m}C_{ds} | | |
| | | | | | | AₖₛGₖₛTₖ | | |
| 1340072 | N/A | N/A | 19913 | 19928 | GTGCATCTTAAGATAC | GₖₛTₖₛGₖₛ^{m}C_{ds}A_{ds}T_{ds} | 47 | 2806 |
| | | | | | | ^{m}C_{ds}T_{ds}T_{ds}A_{ds}A_{ds}G_{ds} | | |
| | | | | | | A_{ds}TₖₛAₖₛ^{m}Cₖ | | |
| 1340095 | N/A | N/A | 19395 | 19410 | ATAAGAGATGAGTAGG | AₖₛTₖₛAₖₛA_{ds}G_{ds}A_{ds}G_{ds} | 56 | 2897 |
| | | | | | | A_{ds}T_{ds}G_{ds}A_{ds}G_{ds}T_{ds}Aₖₛ | | |
| | | | | | | GₖₛGₖ | | |
| 1340097 | N/A | N/A | 14604 | 14619 | TGCGAGAAATCTAAGA | TₖₛGₖₛ^{m}CₖₛG_{ds}A_{ds}G_{ds}A_{ds} | 50 | 2898 |
| | | | | | | A_{ds}A_{ds}T_{dsin}C_{ds}T_{ds}A_{ds} | | |
| | | | | | | AₖₛGₖₛAₖ | | |
| 1340102 | N/A | N/A | 10521 | 10536 | TATAACATGGCTGGCA | TₖₛAₖₛTₖₛA_{ds}A_{ds}^{m}C_{ds}A_{ds} | 33 | 2899 |
| | | | | | | T_{ds}G_{ds}G_{ds}^{m}C_{ds}T_{ds}G_{ds}Gₖₛ | | |
| | | | | | | ^{m}CₖₛAₖ | | |
| 1340109 | 1432 | 1447 | 21247 | 21262 | AAAATATGTCCAGGTT | AₖₛAₖₛAₖₛA_{ds}T_{ds}A_{ds}T_{ds} | 74 | 2900 |
| | | | | | | G_{ds}T_{ds}^{m}C_{ds}^{m}C_{ds}A_{ds}G_{ds} | | |
| | | | | | | GₖₛTₖₛTₖ | | |
| 1340134 | N/A | N/A | 9967 | 9982 | GTAGTGTAAGCTGAGA | GₖₛTₖₛAₖₛG_{ds}T_{ds}G_{ds}T_{ds} | 81 | 2901 |
| | | | | | | A_{ds}A_{ds}G_{ds}^{m}C_{ds}T_{ds}G_{ds} | | |
| | | | | | | AₖₛGₖₛAₖ | | |
| 1340137 | N/A | N/A | 18139 | 18154 | ATGTTATCTCAAGTCA | AₖₛTₖₛGₖₛT_{ds}T_{ds}A_{ds}T_{ds} | 79 | 2902 |
| | | | | | | ^{m}C_{ds}T_{ds}^{m}C_{ds}A_{ds}A_{ds}G_{ds} | | |
| | | | | | | Tₖₛ^{m}CₖₛAₖ | | |
| 1340138 | 1632 | 1647 | 21447 | 21462 | GATTTAAAATAGAGTC | GₖₛAₖₛTₖₛT_{ds}T_{ds}A_{ds}A_{ds} | 46 | 2903 |
| | | | | | | A_{ds}A_{ds}T_{ds}A_{ds}G_{ds}A_{ds}Gₖₛ | | |
| | | | | | | Tₖₛ^{m}Cₖ | | |
| 1340155 | N/A | N/A | 9442 | 9457 | CTCCCACAAAACTAAC | ^{m}CₖₛTₖₛ^{m}Cₖₛ^{m}C_{ds}^{m}C_{ds}A_{ds} | 13 | 2904 |
| | | | | | | ^{m}C_{ds}A_{ds}A_{ds}A_{ds}A_{ds}^{m}C_{ds} | | |
| | | | | | | T_{ds}AₖₛAₖₛ^{m}Cₖ | | |
| 1340172 | N/A | N/A | 11623 | 11638 | TTCTGTAGGACTCTGC | TₖₛTₖₛ^{m}CₖₛT_{ds}G_{ds}T_{ds}A_{ds} | 72 | 2905 |
| | | | | | | G_{ds}G_{ds}A_{ds}^{m}C_{ds}T_{ds}^{m}C_{ds} | | |
| | | | | | | TₖₛGₖₛ^{m}Cₖ | | |
| 1340180 | N/A | N/A | 20417 | 20432 | AAAATTATGCCTTGTG | AₖₛAₖₛAₖₛA_{ds}T_{ds}T_{ds}A_{ds} | 50 | 2906 |
| | | | | | | T_{ds}G_{ds}^{m}C_{ds}^{m}C_{ds}T_{ds}T_{ds} | | |
| | | | | | | TGₖₛTₖₛGₖ | | |
| 1340182 | N/A | N/A | 14915 | 14930 | TACATTAGCAAGCTAA | TₖₛAₖₛ^{m}CₖₛA_{ds}T_{ds}T_{ds}A_{ds} | 29 | 2907 |
| | | | | | | G_{ds}^{m}C_{ds}A_{ds}A_{ds}G_{ds}^{m}C_{ds} | | |
| | | | | | | TₖₛAₖₛAₖ | | |
| 1340213 | N/A | N/A | 20593 | 20608 | GCTGAGAGTTATCTGG | Gₖₛ^{m}CₖₛTₖₛG_{ds}A_{ds}G_{ds}A_{ds} | 65 | 2908 |
| | | | | | | G_{ds}T_{ds}T_{ds}A_{ds}T_{ds}^{m}C_{ds}Tₖₛ | | |
| | | | | | | GₖₛGₖ | | |
| 1340249 | N/A | N/A | 18037 | 18052 | TCATAGTTTATATGGA | Tₖₛ^{m}CₖₛAₖₛT_{ds}A_{ds}G_{ds}T_{ds} | 44 | 2909 |
| | | | | | | T_{ds}T_{ds}A_{ds}T_{ds}A_{ds}T_{ds}Gₖₛ | | |
| | | | | | | GₖₛAₖ | | |
| 1340263 | N/A | N/A | 13609 | 13624 | TTGAAGACAATACAGG | TₖₛTₖₛGₖₛA_{ds}A_{ds}G_{ds}A_{ds} | 63 | 2910 |
| | | | | | | ^{m}C_{ds}A_{ds}A_{ds}T_{ds}A_{ds}^{m}C_{ds} | | |
| | | | | | | AₖₛGₖₛGₖ | | |
| 1340282 | N/A | N/A | 19535 | 19550 | ATAGGCTAAAATGGTC | AₖₛTₖₛAₖₛG_{ds}G_{ds}^{m}C_{ds}T_{ds} | 61 | 2911 |
| | | | | | | A_{ds}A_{ds}A_{ds}A_{ds}T_{ds}G_{ds}Gₖₛ | | |
| | | | | | | Tₖₛ^{m}Cₖ | | |
| 1340287 | N/A | N/A | 18696 | 18711 | AAAAGACTTTGAGACT | AₖₛAₖₛAₖₛA_{ds}G_{ds}A_{ds}^{m}C_{ds} | 32 | 2912 |
| | | | | | | T_{ds}T_{ds}T_{ds}G_{ds}A_{ds}G_{ds}Aₖₛ | | |
| | | | | | | ^{m}CₖₛTₖ | | |
| 1340288 | N/A | N/A | 11115 | 11130 | ACAGAGGAGTTTGCAG | Aₖₛ^{m}CₖₛAₖₛG_{ds}A_{ds}G_{ds}G_{ds} | 37 | 2913 |
| | | | | | | A_{ds}G_{ds}T_{ds}T_{ds}T_{ds}G_{ds}^{m}Cₖₛ | | |
| | | | | | | AₖₛGₖ | | |
| 1340289 | 1309 | 1324 | 21124 | 21139 | TTAAACCTTCCCTGTG | TₖₛTₖₛAₖₛA_{ds}A_{ds}^{m}C_{ds} | 22 | 2807 |
| | | | | | | ^{m}C_{ds}T_{ds}T_{ds}^{m}C_{ds}^{m}C_{ds}^{m}C_{ds} | | |
| | | | | | | T_{ds}GₖₛTₖₛGₖ | | |
| 1340295 | 1178 | 1193 | 20993 | 21008 | TTTTAAGAGGCATGAA | TₖₛTₖₛTₖₛT_{ds}A_{ds}A_{ds}G_{ds} | 53 | 2914 |
| | | | | | | A_{ds}G_{ds}G_{ds}^{m}C_{ds}A_{ds}T_{ds}Gₖₛ | | |
| | | | | | | AₖₛAₖ | | |
| 1340301 | N/A | N/A | 20113 | 20128 | CATCAAGACATTCTAG | ^{m}CₖₛAₖₛTₖₛ^{m}C_{ds}A_{ds}A_{ds} | 49 | 2915 |
| | | | | | | G_{ds}A_{ds}^{m}C_{ds}A_{ds}T_{ds}T_{ds} | | |
| | | | | | | ^{m}C_{ds}TₖₛAₖₛGₖ | | |
| 1340306 | N/A | N/A | 19732 | 19747 | AACTGAAGGTCTGAGC | AₖₛAₖₛ^{m}CₖₛT_{ds}G_{ds}A_{ds}A_{ds} | 55 | 2916 |
| | | | | | | G_{ds}G_{ds}T_{ds}^{m}C_{ds}T_{ds}G_{ds}Aₖₛ | | |
| | | | | | | Gₖₛ^{m}Cₖ | | |
| 1340315 | N/A | N/A | 14284 | 14299 | TGAATGTAAAGGCTGG | TₖₛGₖₛAₖₛA_{ds}T_{ds}G_{ds}T_{ds} | 38 | 2917 |
| | | | | | | A_{ds}A_{ds}A_{ds}G_{ds}G_{ds}^{m}C_{ds}Tₖₛ | | |
| | | | | | | GₖₛGₖ | | |
| 1340333 | 1764 | 1779 | 21579 | 21594 | TACAGTTCCTTTTCCT | TₖₛAₖₛ^{m}CₖₛA_{ds}G_{ds}T_{ds}T_{ds} | 68 | 2918 |
| | | | | | | ^{m}C_{ds}^{m}C_{ds}T_{ds}T_{ds}T_{ds}T_{ds} | | |
| | | | | | | ^{m}Cₖₛ^{m}CₖₛTₖ | | |
| 1340340 | N/A | N/A | 6913 | 6928 | TCGGGAAGTTTAGACA | Tₖₛ^{m}CₖₛGₖₛG_{ds}G_{ds}A_{ds}A_{ds} | 43 | 2919 |
| | | | | | | G_{ds}T_{ds}T_{ds}T_{ds}A_{ds}G_{ds}Aₖₛ | | |
| | | | | | | ^{m}CₖₛAₖ | | |
| 1340341 | N/A | N/A | 6330 | 6345 | GACTTTCATAGGGAGA | GₖₛAₖₛ^{m}CₖₛT_{ds}T_{ds}T_{ds} | 72 | 2920 |
| | | | | | | ^{m}C_{ds}A_{ds}T_{ds}A_{ds}G_{ds}G_{ds}G_{ds} | | |
| | | | | | | AₖₛGₖₛAₖ | | |
| 1340346 | N/A | N/A | 11510 | 11525 | ATTATGAGGATCTGGA | AₖₛTₖₛᵣᵣₖₛA_{ds}T_{ds}G_{ds}A_{ds} | 49 | 2921 |
| | | | | | | G_{ds}G_{ds}A_{ds}T_{ds}^{m}C_{ds}T_{ds}Gₖₛ | | |
| | | | | | | GₖₛAₖ | | |
| 1340359 | N/A | N/A | 13949 | 13964 | AAGTTAGCCCCCAGGA | AₖₛAₖₛGₖₛT_{ds}T_{ds}A_{ds}G_{ds} | 36 | 2811 |
| | | | | | | ^{m}C_{ds}^{m}C_{ds}^{m}C_{ds}^{m}C_{ds}^{m}C_{ds} | | |
| | | | | | | A_{ds}GₖₛGₖₛAₖ | | |
| 1340362 | N/A | N/A | 6734 | 6749 | GATTACCCCTGGCTTT | GₖₛAₖₛTₖₛT_{ds}A_{ds}^{m}C_{ds} | 31 | 2922 |
| | | | | | | ^{m}C_{ds}^{m}C_{ds}^{m}C_{ds}T_{ds}G_{ds}G_{ds} | | |
| | | | | | | ^{m}C_{ds}TₖₛTₖₛTₖ | | |
| 1340391 | N/A | N/A | 12204 | 12219 | TATCATACCACATACC | TₖₛAₖₛTₖₛ^{m}C_{ds}A_{ds}T_{ds}A_{ds} | 24 | 2923 |
| | | | | | | ^{m}C_{ds}^{m}C_{ds}A_{ds}^{m}C_{ds}A_{ds}T_{ds} | | |
| | | | | | | Aₖₛ^{m}Cₖₛ^{m}Cₖ | | |
| 1340393 | N/A | N/A | 5744 | 5759 | CACTGATTTAGTTGGT | ^{m}CₖₛAₖₛ^{m}CₖₛT_{ds}G_{ds}A_{ds} | 66 | 2924 |
| | | | | | | T_{ds}T_{ds}T_{ds}A_{ds}G_{ds}T_{ds}T_{ds} | | |
| | | | | | | GₖₛGₖₛTₖ | | |
| 1340399 | N/A | N/A | 15419 | 15434 | CCAGTAGGTGTGTTTC | ^{m}Cₖₛ^{m}ₙCₖₛAₖₛG_{ds}T_{ds}A_{ds} | 55 | 2925 |
| | | | | | | G_{ds}G_{ds}T_{ds}G_{ds}T_{ds}G_{ds}T_{ds} | | |
| | | | | | | TₖₛTₖₛ^{m}Cₖ | | |
| 1340403 | N/A | N/A | 5673 | 5688 | GGTCAGTAGAGAGCAT | GₖₛGₖₛTₖₛ^{m}C_{ds}A_{ds}G_{ds}T_{ds} | 79 | 2926 |
| | | | | | | A_{ds}G_{ds}A_{ds}G_{ds}A_{ds}G_{ds}^{m}Cₖₛ | | |
| | | | | | | AₖₛTₖ | | |
| 1340409 | 683 | 698 | 12101 | 12116 | GATACCAGTTTTTCCC | GₖₛAₖₛTₖₛA_{ds}^{m}C_{ds}^{m}C_{ds} | 75 | 2927 |
| | | | | | | A_{ds}G_{ds}T_{ds}T_{ds}T_{ds}T_{ds}T_{ds} | | |
| | | | | | | ^{m}Cₖₛ^{m}Cₖₛ^{m}Cₖ | | |
| 1340411 | N/A | N/A | 9206 | 9221 | AGATGTACACTGACAA | AₖₛGₖₛAₖₛT_{ds}G_{ds}T_{ds}A_{ds} | 66 | 2928 |
| | | | | | | ^{m}C_{ds}A_{ds}^{m}C_{ds}T_{ds}G_{ds}A_{ds} | | |
| | | | | | | ^{m}CₖₛAₖₛAₖ | | |
| 1340420 | N/A | N/A | 20193 | 20208 | TGCAGTTATTAGAAGT | TₖₛGₖₛ^{m}CₖₛA_{ds}G_{ds}T_{ds}T_{ds} | 46 | 2929 |
| | | | | | | A_{ds}T_{ds}T_{ds}A_{ds}G_{ds}AcᵢₛAₖₛ | | |
| | | | | | | GₖₛTₖ | | |
| 1340444 | N/A | N/A | 8963 | 8978 | CTCCGTTATAAGTTTC | ^{m}CₖₛTₖₛ^{m}Cₖₛ^{m}C_{ds}G_{ds}T_{ds} | 59 | 2930 |
| | | | | | | T_{ds}A_{ds}T_{ds}A_{ds}A_{ds}G_{ds}T_{ds} | | |
| | | | | | | TₖₛTₖₛ^{m}Cₖ | | |
| 1340456 | N/A | N/A | 16218 | 16233 | TATAGACTGGGTAGGA | TₖₛAₖₛTₖₛA_{ds}G_{ds}A_{ds}^{m}C_{ds} | 61 | 2808 |
| | | | | | | T_{ds}G_{ds}G_{ds}G_{ds}T_{ds}A_{ds}Gₖₛ | | |
| | | | | | | GₖₛAₖ | | |
| 1340460 | N/A | N/A | 9775 | 9790 | ACTAGAACTCCCAACC | Aₖₛ^{m}CₖₛTₖₛA_{ds}G_{ds}A_{ds}A_{ds} | 20 | 2931 |
| | | | | | | ^{m}C_{ds}T_{ds}^{m}C_{ds}^{m}C_{ds}^{m}C_{ds}A_{ds} | | |
| | | | | | | Aₖₛ^{m}Cₖₛ^{m}Cₖ | | |
| 1340467 | N/A | N/A | 8129 | 8144 | TTAGAGTGCTTAGTTC | TₖₛTₖₛAₖₛG_{ds}A_{ds}G_{ds}T_{ds} | 58 | 2932 |
| | | | | | | G_{ds}^{m}C_{ds}T_{ds}T_{ds}A_{ds}G_{ds}Tₖₛ | | |
| | | | | | | Tₖₛ^{m}Cₖ | | |
| 1340473 | N/A | N/A | 3608 | 3623 | TTTAGCAGCTTGGAAG | TₖₛTₖₛTₖₛA_{ds}G_{ds}^{m}C_{ds}A_{ds} | 43 | 2933 |
| | | | | | | G_{ds}^{m}C_{ds}T_{ds}T_{ds}G_{ds}G_{ds}Aₖₛ | | |
| | | | | | | AₖₛGₖ | | |
| 1340474 | N/A | N/A | 16425 | 16440 | TGATATGTCAATACTC | TₖₛGₖₛAₖₛT_{ds}A_{ds}T_{ds}G_{ds} | 57 | 2934 |
| | | | | | | T_{ds}^{m}C_{ds}A_{ds}A_{ds}T_{ds}A_{ds} | | |
| | | | | | | ^{m}CₖₛT_{ds}^{m}Cₖ | | |
| 1340490 | N/A | N/A | 10124 | 10139 | GGATATGTCATCTAAA | GₖₛGₖₛAₖₛT_{ds}A_{ds}T_{ds}G_{ds} | 68 | 2935 |
| | | | | | | T_{ds}^{m}C_{ds}A_{ds}T_{ds}^{m}C_{ds}T_{ds} | | |
| | | | | | | AₖₛAₖₛAₖ | | |
| 1340494 | N/A | N/A | 5896 | 5911 | GTCCTTTGTATTTCGC | GₖₛTₖₛ^{m}Cₖₛ^{m}C_{ds}T_{ds}T_{ds} | 45 | 2936 |
| | | | | | | T_{ds}G_{ds}T_{ds}A_{ds}T_{ds}T_{ds}T_{ds} | | |
| | | | | | | ^{m}CₖₛGₖₛ^{m}Cₖ | | |
| 1340520 | N/A | N/A | 3701 | 3716 | ATTTTCAGATCCCGTT | AₖₛTₖₛTₖₛT_{ds}T_{ds}^{m}C_{ds}A_{ds} | 67 | 2937 |
| | | | | | | G_{ds}A_{ds}T_{ds}^{m}C_{ds}^{m}C_{ds}^{m}C_{ds} | | |
| | | | | | | GₖₛTₖₛTₖ | | |
| 1340530 | N/A | N/A | 3490 | 3505 | TACAGACTAAGGGACC | TₖₛAₖₛ^{m}CₖₛA_{ds}G_{ds}A_{ds} | 68 | 2938 |
| | | | | | | ^{m}C_{ds}T_{ds}A_{ds}A_{ds}G_{ds}G_{ds}G_{ds} | | |
| | | | | | | Aₖₛ^{m}Cₖₛ^{m}Cₖ | | |
| 1340531 | N/A | N/A | 9337 | 9352 | CCTCGATCCTATATAC | ^{m}Cₖₛ^{m}CₖₛTₖₛ^{m}C_{ds}G_{ds}A_{ds} | 31 | 2812 |
| | | | | | | T_{ds}^{m}C_{ds}^{m}C_{ds}T_{ds}A_{ds}T_{ds} | | |
| | | | | | | A_{ds}TₖₛAₖₛ^{m}Cₖ | | |
| 1340532 | N/A | N/A | 12801 | 12816 | AGGCTGTAAGAGTCAG | AₖₛGₖₛGₖₛ^{m}C_{ds}T_{ds}G_{ds}T_{ds} | 74 | 2809 |
| | | | | | | A_{ds}A_{ds}G_{ds}A_{ds}G_{ds}T_{ds}^{m}Cₖₛ | | |
| | | | | | | AₖₛGₖ | | |
| 1340565 | N/A | N/A | 5844 | 5859 | CCCCAAACATGGATGT | ^{m}Cₖₛ^{m}Cₖₛ^{m}Cₖₛ^{m}C_{ds}A_{ds}A_{ds} | 62 | 2939 |
| | | | | | | A_{ds}^{m}C_{ds}A_{ds}T_{ds}G_{ds}G_{ds}A_{ds} | | |
| | | | | | | TₖₛGₖₛTₖ | | |
| 1340586 | 811 | 826 | 15692 | 15707 | TTATTGGTAAGTATTC | TₖₛTₖₛAₖₛT_{ds}T_{ds}G_{ds}G_{ds} | 17 | 2940 |
| | | | | | | T_{ds}A_{ds}A_{ds}G_{ds}T_{ds}A_{ds}Tₖₛ | | |
| | | | | | | Tₖₛ^{m}Cₖ | | |
| 1340599 | N/A | N/A | 6599 | 6614 | GGCTACTTTCAAACCT | GₖₛGₖₛ^{m}CₖₛT_{ds}A_{ds}^{m}C_{ds} | 54 | 2941 |
| | | | | | | T_{ds}T_{ds}T_{ds}^{m}C_{ds}A_{ds}A_{ds}A_{ds} | | |
| | | | | | | ^{m}Cₖₛ^{m}CₖₛTₖ | | |
| 1340600 | N/A | N/A | 8538 | 8553 | GTTTTGCAAGTTTATC | GₖₛTₖₛTₖₛT_{ds}T_{ds}G_{ds}^{m}C_{ds} | 73 | 2942 |
| | | | | | | A_{ds}A_{ds}G_{ds}T_{ds}T_{ds}T_{ds}Aₖₛ | | |
| | | | | | | Tₖₛ^{m}Cₖ | | |
| 1340612 | N/A | N/A | 6450 | 6465 | AGTAGTAATTCTAAAC | AₖₛGₖₛTₖₛA_{ds}G_{ds}T_{ds}A_{ds} | 23 | 2943 |
| | | | | | | A_{ds}T_{ds}T_{ds}^{m}C_{ds}T_{ds}A_{ds}Aₖₛ | | |
| | | | | | | Aₖₛ^{m}Cₖ | | |
| 1340625 | N/A | N/A | 7527 | 7542 | TCCGAAAAAAGTGGAG | Tₖₛ^{m}Cₖₛ^{m}CₖₛG_{ds}A_{ds}A_{ds} | 12 | 2944 |
| | | | | | | A_{ds}A_{ds}A_{ds}A_{ds}G_{ds}T_{ds}G_{ds} | | |
| | | | | | | GₖₛAₖₛGₖ | | |
| 1340627 | N/A | N/A | 10292 | 10307 | GAGAGAACTTATACAA | GₖₛAₖₛGₖₛA_{ds}G_{ds}A_{ds}A_{ds} | 37 | 2945 |
| | | | | | | ^{m}C_{ds}T_{ds}T_{ds}A_{ds}T_{ds}A_{ds} | | |
| | | | | | | ^{m}CₖₛAₖₛAₖ | | |
| 1340629 | 77 | 92 | 3171 | 3186 | CAGAAGGATTTCTAGG | ^{m}CₖₛAₖₛGₖₛA_{ds}A_{ds}G_{ds}G_{ds} | 43 | 2946 |
| | | | | | | A_{ds}T_{ds}T_{ds}T_{ds}^{m}C_{ds}T_{ds}Aₖₛ | | |
| | | | | | | GₖₛGₖ | | |
| 1340633 | N/A | N/A | 4662 | 4677 | CCCGCCCTTAAGTCAT | ^{m}Cₖₛ^{m}Cₖₛ^{m}CₖₛG_{ds}^{m}C_{ds} | 45 | 2947 |
| | | | | | | ^{m}C_{ds}^{m}C_{ds}T_{ds}T_{ds}A_{ds}A_{ds} | | |
| | | | | | | G_{ds}T_{ds}^{m}CₖₛAₖₛTₖ | | |
| 1340643 | N/A | N/A | 5277 | 5292 | GCTAGACAATTGCAAA | Gₖₛ^{m}CₖₛTₖₛA_{ds}G_{ds}A_{ds} | 77 | 2948 |
| | | | | | | ^{m}C_{ds}A_{ds}A_{ds}T_{ds}T_{ds}G_{ds} | | |
| | | | | | | ^{m}C_{ds}AₖₛAₖₛAₖ | | |
| 1340686 | N/A | N/A | 5189 | 5204 | TTCCCAACGCAACAGT | TₖₛTₖₛ^{m}Cₖₛ^{m}C_{ds}^{m}C_{ds}A_{ds} | 60 | 2949 |
| | | | | | | A_{ds}^{m}C_{ds}G_{ds}^{m}C_{ds}A_{ds}A_{ds} | | |
| | | | | | | ^{m}C_{ds}AₖₛGₖₛTₖ | | |
| 1340694 | N/A | N/A | 5648 | 5663 | GAGCATTCATCAGATG | GₖₛAₖₛGₖₛ^{m}C_{ds}A_{ds}T_{ds}T_{ds} | 64 | 2950 |
| | | | | | | ^{m}C_{ds}A_{ds}T_{ds}^{m}C_{ds}A_{ds}G_{ds} | | |
| | | | | | | AₖₛTₖₛGₖ | | |
| 1340698 | N/A | N/A | 6087 | 6102 | AGTTTTCACCTCAGGT | AₖₛGₖₛTₖₛT_{ds}T_{ds}T_{ds}^{m}C_{ds} | 82 | 2951 |
| | | | | | | A_{ds}^{m}C_{ds}^{m}C_{ds}T_{ds}^{m}C_{ds}A_{ds} | | |
| | | | | | | GₖₛGₖₛTₖ | | |
| 1340709 | N/A | N/A | 9116 | 9131 | AGACAGACCAAGTAGC | AₖₛGₖₛAₖₛ^{m}C_{ds}A_{ds}G_{ds}A_{ds} | 21 | 2952 |
| | | | | | | ^{m}C_{ds}^{m}C_{ds}A_{ds}A_{ds}G_{ds}T_{ds} | | |
| | | | | | | AₖₛGₖₛ^{m}Cₖ | | |
| 1340719 | N/A | N/A | 9944 | 9959 | ACCACACTAATGAATC | Aₖₛ^{m}Cₖₛ^{m}CₖₛA_{ds}^{m}C_{ds}A_{ds} | 54 | 2953 |
| | | | | | | ^{m}C_{ds}T_{ds}A_{ds}A_{ds}T_{ds}G_{ds}A_{ds} | | |
| | | | | | | AₖₛTₖₛ^{m}Cₖ | | |
| 1340726 | N/A | N/A | 6262 | 6277 | TGAGATGGGCAAGGCC | TₖₛGₖₛAₖₛG_{ds}A_{ds}T_{ds}G_{ds} | 53 | 2954 |
| | | | | | | G_{ds}G_{ds}^{m}C_{ds}A_{ds}A_{ds}G_{ds}Gₖₛ | | |
| | | | | | | ^{m}Cₖₛ^{m}Cₖ | | |
| 1340728 | N/A | N/A | 8645 | 8660 | GGCAAGACAGACTGTT | GₖₛGₖₛ^{m}CₖₛA_{ds}A_{ds}G_{ds}A_{ds} | 75 | 2955 |
| | | | | | | ^{m}C_{ds}A_{ds}G_{ds}A_{ds}^{m}C_{ds}T_{ds} | | |
| | | | | | | GₖₛTₖₛTₖ | | |
| 1340729 | N/A | N/A | 14191 | 14206 | GATTGAGTTCTCCACT | GₖₛAₖₛTₖₛT_{ds}G_{ds}A_{ds}G_{ds} | 45 | 2956 |
| | | | | | | T_{ds}T_{ds}^{m}C_{ds}T_{ds}^{m}C_{ds}^{m}C_{ds} | | |
| | | | | | | Aₖₛ^{m}CₖₛTₖ | | |
| 1340739 | N/A | N/A | 16288 | 16303 | TTAGAATAGTCTTCAG | TₖₛTₖₛAₖₛG_{ds}A_{ds}A_{ds}T_{ds} | 52 | 2957 |
| | | | | | | A_{ds}G_{ds}T_{ds}^{m}C_{ds}T_{ds}T_{ds} | | |
| | | | | | | ^{m}CₖₛAₖₛGₖ | | |
| 1340752 | N/A | N/A | 9590 | 9605 | AGCTGGTAAAGGTAAG | AₖₛGₖₛ^{m}CₖₛT_{ds}G_{ds}G_{ds}T_{ds} | 55 | 2958 |
| | | | | | | A_{ds}A_{ds}A_{ds}G_{ds}G_{ds}T_{ds}Aₖₛ | | |
| | | | | | | AₖₛGₖ | | |
| 1340755 | N/A | N/A | 3995 | 4010 | ATGTAGTGTTTACAAG | AₖₛTₖₛGₖₛT_{ds}A_{ds}G_{ds}T_{ds} | 58 | 2959 |
| | | | | | | G_{ds}T_{ds}T_{ds}T_{ds}A_{ds}^{m}C_{ds}Aₖₛ | | |
| | | | | | | AₖₛGₖ | | |
| 1340769 | N/A | N/A | 12666 | 12681 | GTTAACCTGCAGCAGA | GₖₛTₖₛTₖₛA_{ds}A_{ds}^{m}C_{ds} | 51 | 2960 |
| | | | | | | ^{m}C_{ds}T_{ds}G_{ds}^{m}C_{ds}A_{ds}G_{ds} | | |
| | | | | | | ^{m}C_{ds}AₖₛGₖₛAₖ | | |
| 1340791 | N/A | N/A | 17953 | 17968 | TAGAAACTGCTCCTCA | TₖₛAₖₛGₖₛA_{ds}A_{ds}A_{ds}^{m}C_{ds} | 32 | 2961 |
| | | | | | | T_{ds}G_{ds}^{m}C_{ds}T_{ds}^{m}C_{ds}^{m}C_{ds} | | |
| | | | | | | Tₖₛ^{m}CₖₛAₖ | | |
| 1340795 | N/A | N/A | 7789 | 7804 | GTGACATAACTACTTC | GₖₛTₖₛGₖₛA_{ds}^{m}C_{ds}A_{ds}T_{ds} | 68 | 2962 |
| | | | | | | A_{ds}A_{ds}^{m}C_{ds}T_{ds}A_{ds}^{m}C_{ds} | | |
| | | | | | | TₖₛTₖₛ^{m}Cₖ | | |
| 1340801 | N/A | N/A | 4246 | 4261 | TAAGTGTAAGAGACAT | TₖₛAₖₛAₖₛG_{ds}T_{ds}G_{ds}T_{ds} | 63 | 2963 |
| | | | | | | A_{ds}A_{ds}G_{ds}A_{ds}G_{ds}A_{ds}^{m}Cₖₛ | | |
| | | | | | | AₖₛTₖ | | |
| 1340810 | N/A | N/A | 12480 | 12495 | GGAGCTAGATACTCAA | GₖₛGₖₛAₖₛG_{ds}^{m}C_{ds}T_{ds}A_{ds} | 42 | 2964 |
| | | | | | | G_{ds}A_{ds}T_{ds}A_{ds}^{m}C_{ds}T_{ds} | | |
| | | | | | | ^{m}CₖₛAₖₛAₖ | | |
| 1340819 | N/A | N/A | 18530 | 18545 | TCCTACAGTGCTTAGT | Tₖₛ^{m}Cₖₛ^{m}CₖₛT_{ds}A_{ds}^{m}C_{ds} | 44 | 2965 |
| | | | | | | A_{ds}G_{ds}T_{ds}G_{ds}^{m}C_{ds}T_{ds}T_{ds} | | |
| | | | | | | AₖₛGₖₛTₖ | | |
| 1340907 | N/A | N/A | 5121 | 5136 | AAGGAGCCAGTTATGA | AₖₛAₖₛGᵣₖₛG_{ds}A_{ds}G_{ds} | 57 | 2966 |
| | | | | | | ^{m}C_{ds}^{m}C_{ds}A_{ds}G_{ds}T_{ds}T_{ds} | | |
| | | | | | | A_{ds}TₖₛGₖₛAₖ | | |
| 1340917 | N/A | N/A | 9666 | 9681 | ATGCAGCTATAGGTAG | AₖₛTₖₛGₖₛ^{m}C_{ds}A_{ds}G_{ds} | 41 | 2967 |
| | | | | | | ^{m}C_{ds}T_{ds}A_{ds}T_{ds}A_{ds}G_{ds}G_{ds} | | |
| | | | | | | TₖₛAₖₛGₖ | | |

TABLE 51
Inhibition of HSD17B13 RNA by modified oligonucleotides
targeting SEQ ID NO.: 1, and 2

| | SEQ ID | SEQ ID | SEQ ID | SEQ ID | | | | |
|---|---|---|---|---|---|---|---|---|
| | NO: 1 | NO: 1 | NO: 2 | NO: 2 | | | | SEQ |
| Compound | Start | Stop | Start | Stop | Sequence | Chemistry Notation | % | ID |
| Number | Site | Site | Site | Site | (5′ to 3′) | (5′ to 3′) | inhibition | NO |
| 1245927 | N/A | N/A | 3433 | 3448 | AGTAGATGGTAAGTCA | AₖₛGₖₛTₖₛA_{ds}G_{ds}A_{ds}T_{ds} | 77 | 121 |
| | | | | | | G_{ds}G_{ds}T_{ds}A_{ds}A_{ds}G_{ds}Tₖₛ | | |
| | | | | | | ^{m}CₖₛAₖ | | |
| 1246023 | N/A | N/A | 5046 | 5061 | GAGTGAATCATTCAGT | GₖₛAₖₛGₖₛT_{ds}G_{ds}A_{ds}A_{ds} | 81 | 1526 |
| | | | | | | T_{ds}^{m}C_{ds}A_{ds}T_{ds}T_{ds}^{m}C_{ds} | | |
| | | | | | | AₖₛGₖₛTₖ | | |
| 1341164 | 610 | 625 | N/A | N/A | GAACAATATGGGATGA | GₖₛAₖₛA_{ds}^{m}C_{ds}A_{ds}A_{ds}T_{ds} | 49 | 1735 |
| | | | | | | A_{ds}T_{ds}G_{ds}G_{ds}GₖₛAₑₛTₖₛ | | |
| | | | | | | GₑₛAₖ | | |
| 1341172 | 812 | 827 | 15693 | 15708 | CTTATTGGTAAGTATT | ^{m}CₖₛTₖₛT_{ds}A_{ds}T_{ds}T_{ds}G_{ds} | 9 | 1350 |
| | | | | | | G_{ds}T_{ds}A_{ds}A_{ds}GₖₛTₑₛAₖₛ | | |
| | | | | | | TₑₛTₖ | | |
| 1341178 | 698 | 713 | 12116 | 12131 | GAGACATGAGGTTTTG | GₖₛAₖₛG_{ds}A_{ds}^{m}C_{ds}A_{ds}T_{ds} | 49 | 725 |
| | | | | | | G_{ds}A_{ds}G_{ds}G_{ds}TₖₛTₑₛTₖₛ | | |
| | | | | | | TₑₛGₖ | | |
| 1341186 | 1079 | 1094 | 20894 | 20909 | GCTAGTGCCAAACCAA | Gₖₛ^{m}CₖₛT_{ds}A_{ds}G_{ds}T_{ds}G_{ds} | 62 | 1354 |
| | | | | | | ^{m}C_{ds}^{m}C_{ds}A_{ds}A_{ds}Aₖₛ^{m}Cₑₛ | | |
| | | | | | | ^{m}CₖₛAₑₛAₖ | | |
| 1341188 | 1017 | 1032 | 20832 | 20847 | CAGCATTGATTCGAAA | ^{m}CₖₛAₖₛG_{ds}^{m}C_{ds}A_{ds}T_{ds} | 58 | 263 |
| | | | | | | T_{ds}G_{ds}A_{ds}T_{ds}T_{ds}^{m}CₖₛGₑₛ | | |
| | | | | | | AₖₛAₑₛAₖ | | |
| 1341192 | 1200 | 1215 | 21015 | 21030 | ATGTTTATGTAAGCAC | AₖₛTₖₛG_{ds}T_{ds}T_{ds}T_{ds}A_{ds} | 61 | 2622 |
| | | | | | | T_{ds}G_{ds}T_{ds}A_{ds}AₖₛGₑₛ^{m}Cₖₛ | | |
| | | | | | | Aₑₛ^{m}Cₖ | | |
| 1341196 | 1088 | 1103 | 20903 | 20918 | TTGACTGCTGCTAGTG | TₖₛTₖₛG_{ds}A_{ds}^{m}C_{ds}T_{ds}G_{ds} | 29 | 28 |
| | | | | | | ^{m}C_{ds}T_{ds}G_{ds}^{m}C_{ds}TₖₛAₑₛ | | |
| | | | | | | GₖₛTₑₛGₖ | | |
| 1341199 | 1083 | 1098 | 20898 | 20913 | TGCTGCTAGTGCCAAA | TₖₛGₖₛ^{m}C_{ds}T_{ds}G_{ds}^{m}C_{ds} | 40 | 1665 |
| | | | | | | T_{ds}A_{ds}G_{ds}T_{ds}G_{ds}^{m}Cₖₛ | | |
| | | | | | | ^{m}CₑₛAₖₛAₑₛAₖ | | |
| 1341203 | 1311 | 1326 | 21126 | 21141 | TCTTAAACCTTCCCTG | Tₖₛ^{m}CₖₛT_{ds}T_{ds}A_{ds}A_{ds}A_{ds} | 24 | 2160 |
| | | | | | | ^{m}C_{ds}^{m}C_{ds}T_{ds}T_{ds}^{m}Cₖₛ^{m}Cₑₛ | | |
| | | | | | | ^{m}CₖₛTₑₛGₖ | | |
| 1341208 | 1315 | 1330 | 21130 | 21145 | ACAGTCTTAAACCTTC | Aₖₛ^{m}CₖₛA_{ds}G_{ds}T_{ds}^{m}C_{ds} | 46 | 110 |
| | | | | | | T_{ds}T_{ds}A_{ds}A_{ds}A_{ds}^{m}Cₖₛ | | |
| | | | | | | ^{m}CₑₛTₖₛTₑₛ^{m}Cₖ | | |
| 1341209 | 1257 | 1272 | 21072 | 21087 | AGCTTTTGTCCACCTT | AₖₛGₖₛ^{m}C_{ds}T_{ds}T_{ds}T_{ds}T_{ds} | 62 | 1822 |
| | | | | | | G_{ds}T_{ds}^{m}C_{ds}^{m}C_{ds}Aₖₛ^{m}Cₑₛ | | |
| | | | | | | ^{m}CₖₛTₑₛTₖ | | |
| 1341215 | 1323 | 1338 | 21138 | 21153 | CTACTTGAACAGTCTT | ^{m}CₖₛTₖₛA_{ds}^{m}C_{ds}T_{ds}T_{ds} | 47 | 734 |
| | | | | | | G_{ds}A_{ds}A_{ds}^{m}C_{ds}A_{ds}GₖₛTₑₛ | | |
| | | | | | | ^{m}CₖₛTₑₛTₖ | | |
| 1341221 | 1327 | 1342 | 21142 | 21157 | AATGCTACTTGAACAG | AₖₛAₖₛT_{ds}G_{ds}^{m}C_{ds}T_{ds}A_{ds} | 39 | 1045 |
| | | | | | | ^{m}C_{ds}T_{ds}T_{ds}G_{ds}AₖₛAₑₛ | | |
| | | | | | | ^{m}CₖₛAₑₛGₖ | | |
| 1341224 | 1337 | 1352 | 21152 | 21167 | TACAGATTGGAATGCT | TₖₛAₖₛ^{m}C_{ds}A_{ds}G_{ds}A_{ds}T_{ds} | 35 | 1746 |
| | | | | | | T_{ds}G_{ds}G_{ds}A_{ds}AₖₛTₑₛGₖₛ | | |
| | | | | | | ^{m}CₑₛTₖ | | |
| 1341229 | 1331 | 1346 | 21146 | 21161 | TTGGAATGCTACTTGA | TₖₛTₖₛG_{ds}G_{ds}A_{ds}A_{ds}T_{ds} | 54 | 1279 |
| | | | | | | G_{ds}^{m}C_{ds}T_{ds}A_{ds}^{m}CₖₛTₑₛ | | |
| | | | | | | TₖₛGₑₛAₖ | | |
| 1341230 | 1351 | 1366 | 21166 | 21181 | TTCTGTGGCATGGCTA | TₖₛTₖₛ^{m}C_{ds}T_{ds}G_{ds}T_{ds}G_{ds} | 50 | 812 |
| | | | | | | G_{ds}^{m}C_{ds}A_{ds}T_{ds}GₖₛGₑₛ | | |
| | | | | | | ^{m}CₖₛTₑₛAₖ | | |
| 1341235 | 1355 | 1370 | 21170 | 21185 | GATATTCTGTGGCATG | GₖₛAₖₛT_{ds}A_{ds}T_{ds}T_{ds}^{m}C_{ds} | 52 | 1046 |
| | | | | | | T_{ds}G_{ds}T_{ds}G_{ds}Gₖₛ^{m}CₑₛAₖₛ | | |
| | | | | | | TₑₛGₖ | | |
| 1341245 | 1391 | 1406 | 21206 | 21221 | GATCTCTTAGCTGTGC | GₖₛAₖₛT_{ds}^{m}C_{ds}T_{ds}^{m}C_{ds} | 45 | 502 |
| | | | | | | T_{ds}T_{ds}A_{ds}G_{ds}^{m}C_{ds}TₖₛGₑₛ | | |
| | | | | | | TₖₛGₑₛ^{m}Cₖ | | |
| 1341249 | 1359 | 1374 | 21174 | 21189 | TGTTGATATTCTGTGG | TₖₛGₖₛT_{ds}T_{ds}G_{ds}A_{ds}T_{ds} | 54 | 1358 |
| | | | | | | A_{ds}T_{ds}T_{ds}^{m}C_{ds}TₖₛGₑₛTₖₛ | | |
| | | | | | | GₑₛGₖ | | |
| 1341252 | 1431 | 1446 | 21246 | 21261 | AAATATGTCCAGGTTG | AₖₛAₖₛA_{ds}T_{ds}A_{ds}T_{ds}G_{ds} | 61 | 581 |
| | | | | | | T_{ds}^{m}C_{ds}^{m}C_{ds}A_{ds}GₖₛGₑₛ | | |
| | | | | | | TₖₛTₑₛGₖ | | |
| 1341253 | 1419 | 1434 | 21234 | 21249 | GTTGAGATAAAGCTGC | GₖₛTₖₛT_{ds}G_{ds}A_{ds}G_{ds}A_{ds} | 40 | 1748 |
| | | | | | | T_{ds}A_{ds}A_{ds}A_{ds}Gₖₛ^{m}CₑₛTₖₛ | | |
| | | | | | | Gₑₛ^{m}Cₖ | | |
| 1341256 | 1423 | 1438 | 21238 | 21253 | CCAGGTTGAGATAAAG | ^{m}Cₖₛ^{m}CₖₛA_{ds}G_{ds}G_{ds}T_{ds} | 55 | 33 |
| | | | | | | T_{ds}G_{ds}A_{ds}G_{ds}A_{ds}TₖₛAₑₛ | | |
| | | | | | | AₖₛAₑₛGₖ | | |
| 1341264 | 1492 | 1507 | 21307 | 21322 | CACCGTTTTGGGCTAA | ^{m}CₖₛAₖₛ^{m}C_{ds}^{m}C_{ds}G_{ds}T_{ds} | 42 | 1516 |
| | | | | | | T_{ds}T_{ds}T_{ds}G_{ds}G_{ds}Gₖₛ^{m}Cₑₛ | | |
| | | | | | | TₖₛAₑₛAₖ | | |
| 1341270 | 1602 | 1617 | 21417 | 21432 | ATGTATCTTATAAGAC | AₖₛTₖₛG_{ds}T_{ds}A_{ds}T_{ds}^{m}C_{ds} | 18 | 1751 |
| | | | | | | T_{ds}T_{ds}A_{ds}T_{ds}AₖₛAₑₛGₖₛ | | |
| | | | | | | Aₑₛ^{m}Cₖ | | |
| 1341272 | 1501 | 1516 | 21316 | 21331 | ATAGAGTTGCACCGTT | AₖₛTₖₛA_{ds}G_{ds}A_{ds}G_{ds}T_{ds} | 45 | 192 |
| | | | | | | T_{ds}G_{ds}^{m}C_{ds}A_{ds}^{m}Cₖₛ^{m}Cₑₛ | | |
| | | | | | | GₖₛTₑₛTₖ | | |
| 1341276 | 1617 | 1632 | 21432 | 21447 | CGGTCACCTTTCATAA | ^{m}CₖₛGₖₛG_{ds}T_{ds}^{m}C_{ds}A_{ds} | 70 | 36 |
| | | | | | | ^{m}C_{ds}^{m}C_{ds}T_{ds}T_{ds}T_{ds}^{m}Cₖₛ | | |
| | | | | | | AₑₛTₖₛAₑₛAₖ | | |
| 1341278 | 1621 | 1636 | 21436 | 21451 | GAGTCGGTCACCTTTC | GₖₛAₖₛG_{ds}T_{ds}^{m}C_{ds}G_{ds}G_{ds} | 62 | 350 |
| | | | | | | T_{ds}^{m}C_{ds}A_{ds}^{m}C_{ds}^{m}CₖₛTₑₛ | | |
| | | | | | | TₖₛTₑₛ^{m}Cₖ | | |
| 1341282 | 1625 | 1640 | 21440 | 21455 | AATAGAGTCGGTCACC | AₖₛAₖₛT_{ds}A_{ds}G_{ds}A_{ds}G_{ds} | 13 | 662 |
| | | | | | | T_{ds}^{m}C_{ds}G_{ds}G_{ds}Tₖₛ^{m}Cₑₛ | | |
| | | | | | | Aₖₛ^{m}Cₑₛ^{m}Cₖ | | |
| 1341289 | 1629 | 1644 | 21444 | 21459 | TTAAAATAGAGTCGGT | TₖₛTₖₛA_{ds}A_{ds}A_{ds}A_{ds}T_{ds} | 51 | 973 |
| | | | | | | A_{ds}G_{ds}A_{ds}G_{ds}Tₖₛ^{m}CₑₛGₖₛ | | |
| | | | | | | GₑₛTₖ | | |
| 1341293 | 1713 | 1728 | 21528 | 21543 | AACATCTCTGGGACCA | AₖₛAₖₛ^{m}C_{ds}A_{ds}T_{ds}^{m}C_{ds} | 36 | 273 |
| | | | | | | T_{ds}^{m}C_{ds}T_{ds}G_{ds}G_{ds}GₖₛAₑₛ | | |
| | | | | | | ^{m}Cₖₛ^{m}CₑₛAₖ | | |
| 1341294 | 1708 | 1723 | 21523 | 21538 | CTCTGGGACCAAGGAT | ^{m}CₖₛTₖₛ^{m}C_{ds}T_{ds}G_{ds}G_{ds} | 39 | 1908 |
| | | | | | | G_{ds}A_{ds}^{m}C_{ds}^{m}C_{ds}A_{ds}Aₖₛ | | |
| | | | | | | GₑₛGₖₛAₑₛTₖ | | |
| 1341301 | 1777 | 1792 | 21592 | 21607 | ATGTAATAGCCAGTAC | AₖₛTₖₛG_{ds}T_{ds}A_{ds}A_{ds}T_{ds} | 47 | 430 |
| | | | | | | A_{ds}G_{ds}^{m}C_{ds}^{m}C_{ds}AₖₛGₑₛ | | |
| | | | | | | TₖₛAₑₛ^{m}Cₖ | | |
| 1341304 | 1766 | 1781 | 21581 | 21596 | AGTACAGTTCCTTTTC | AₖₛGₖₛT_{ds}A_{ds}^{m}C_{ds}A_{ds}G_{ds} | 40 | 1597 |
| | | | | | | T_{ds}T_{ds}^{m}C_{ds}^{m}C_{ds}TₖₛTₑₛ | | |
| | | | | | | TₖₛTₑₛ^{m}Cₖ | | |
| 1341311 | 1773 | 1788 | 21588 | 21603 | AATAGCCAGTACAGTT | AₖₛAₖₛT_{ds}A_{ds}G_{ds}^{m}C_{ds} | 36 | 118 |
| | | | | | | ^{m}C_{ds}A_{ds}G_{ds}T_{ds}A_{ds}^{m}Cₖₛ | | |
| | | | | | | AₑₛGₖₛTₑₛTₖ | | |
| 1341319 | 1781 | 1796 | 21596 | 21611 | TCTTATGTAATAGCCA | Tₖₛ^{m}CₖₛT_{ds}T_{ds}A_{ds}T_{ds}G_{ds} | 65 | 742 |
| | | | | | | T_{ds}A_{ds}A_{ds}T_{ds}AₖₛGₑₛ^{m}Cₖₛ | | |
| | | | | | | ^{m}CₑₛAₖ | | |
| 1341322 | 2254 | 2269 | 22069 | 22084 | CAAGAGGATAGTCCAT | ^{m}CₖₛAₖₛA_{ds}G_{ds}A_{ds}G_{ds}G_{ds} | 22 | 510 |
| | | | | | | A_{ds}T_{ds}A_{ds}G_{ds}Tₖₛ^{m}Cₑₛ | | |
| | | | | | | ^{m}CₖₛAₑₛTₖ | | |
| 1341326 | 2245 | 2260 | 22060 | 22075 | AGTCCATGCAAAAGCA | AₖₛGₖₛT_{ds}^{m}C_{ds}^{m}C_{ds}A_{ds} | 52 | 120 |
| | | | | | | T_{ds}G_{ds}^{m}C_{ds}A_{ds}A_{ds}AₖₛAₑₛ | | |
| | | | | | | Gₖₛ^{m}CₑₛAₛₖ | | |
| 1341327 | 2191 | 2206 | 22006 | 22021 | GTCTTGATGTAGTGGG | GₖₛTₖₛ^{M}C_{ds}T_{ds}T_{ds}G_{ds}A_{ds} | 18 | 1132 |
| | | | | | | T_{ds}G_{ds}T_{ds}A_{ds}GₖₛTₑₛGₖₛ | | |
| | | | | | | GₑₛGₖ | | |
| 1341333 | N/A | N/A | 9518 | 9533 | CTACACTAATATTGAG | ^{m}CₖₛTₖₛA_{ds}^{m}C_{ds}A_{ds}^{m}C_{ds} | 5 | 59 |
| | | | | | | T_{ds}A_{ds}A_{ds}T_{ds}A_{ds}TₖₛTₑₛ | | |
| | | | | | | GₖₛAₑₛGₖ | | |
| 1341338 | 2355 | 2370 | 22170 | 22185 | TTATAACTACAAGAGG | TₖₛTₖₛA_{ds}T_{ds}A_{ds}A_{ds}^{m}C_{ds} | 55 | 1289 |
| | | | | | | T_{ds}A_{ds}^{m}C_{ds}A_{ds}AₖₛGₑₛAₖₛ | | |
| | | | | | | GₑₛGₖ | | |
| 1341345 | N/A | N/A | 11853 | 11868 | AGCAGAATTGTGAACG | AₖₛGₖₛ^{m}C_{ds}A_{ds}G_{ds}A_{ds}A_{ds} | 31 | 844 |
| | | | | | | T_{ds}T_{ds}G_{ds}T_{ds}GₖₛAₑₛAₖₛ | | |
| | | | | | | ^{m}CₑₛGₖ | | |
| 1341357 | N/A | N/A | 12421 | 12436 | TGGTAACGGTGATCAA | TₖₛGₖₛG_{ds}T_{ds}A_{ds}A_{ds}^{m}C_{ds} | 26 | 67 |
| | | | | | | G_{ds}G_{ds}T_{ds}G_{ds}AₖₛTₑₛ^{m}Cₖₛ | | |
| | | | | | | AₑₛAₖ | | |
| 1341368 | N/A | N/A | 16131 | 16146 | GCTCCATAATAATAGC | Gₖₛ^{m}CₖₛT_{ds}^{m}C_{ds}^{m}C_{ds}A_{ds} | 15 | 2665 |
| | | | | | | T_{ds}A_{ds}A_{ds}T_{ds}A_{ds}AₖₛTₑₛ | | |
| | | | | | | AₖₛGₑₛ^{m}Cₖ | | |
| 1341374 | N/A | N/A | 18099 | 18114 | CTGAAATTGATACACC | ^{m}CₖₛTₖₛG_{ds}A_{ds}A_{ds}A_{ds}T_{ds} | 45 | 393 |
| | | | | | | T_{ds}G_{ds}A_{ds}T_{ds}Aₖₛ^{m}CₑₛAₖₛ | | |
| | | | | | | ^{m}Cₑₛ^{m}Cₖ | | |
| 1341378 | N/A | N/A | 17991 | 18006 | GTTAGTATAGTTATCT | GₖₛTₖₛT_{ds}A_{ds}G_{ds}T_{ds}A_{ds} | 51 | 1171 |
| | | | | | | T_{ds}A_{ds}G_{ds}T_{ds}TₖₛAₑₛTₖₛ | | |
| | | | | | | ^{m}CₑₛTₖ | | |
| 1341381 | N/A | N/A | 19911 | 19926 | GCATCTTAAGATACCC | Gₖₛ^{m}CₖₛA_{ds}T_{ds}^{m}C_{ds}T_{ds} | 41 | 553 |
| | | | | | | T_{ds}A_{ds}A_{ds}G_{ds}A_{ds}TₖₛAₑₛ | | |
| | | | | | | ^{m}Cₖ^{m}Cₑₛ^{m}Cₛₖ | | |
| 1341385 | N/A | N/A | 19907 | 19922 | CTTAAGATACCCAGGT | ^{m}CₖₛTₖₛT_{ds}A_{ds}A_{ds}G_{ds}A_{ds} | 34 | 241 |
| | | | | | | T_{ds}A_{ds}^{m}C_{ds}^{m}C_{ds}^{m}CₖₛAₑₛ | | |
| | | | | | | GₖₛGₑₛTₖ | | |
| 1341390 | N/A | N/A | 20114 | 20129 | GCATCAAGACATTCTA | Gₖₛ^{m}CₖₛA_{ds}T_{ds}^{m}C_{ds}A_{ds} | 43 | 1565 |
| | | | | | | A_{ds}G_{ds}A_{ds}^{m}C_{ds}A_{ds}TₖₛTₑₛ | | |
| | | | | | | ^{m}CₖₛTₑₛAₖ | | |
| 1341398 | N/A | N/A | 20194 | 20209 | TTGCAGTTATTAGAAG | TₖₛTₖₛG_{ds}^{m}C_{ds}A_{ds}G_{ds}T_{ds} | 27 | 2123 |
| | | | | | | T_{ds}A_{ds}T_{ds}T_{ds}AₖₛGₑₛAₖₛ | | |
| | | | | | | AₑₛGₖ | | |
| 1341403 | N/A | N/A | 12801 | 12816 | AGGCTGTAAGAGTCAG | AₖₛGₖₛG_{ds}^{m}C_{ds}T_{ds}G_{ds}T_{ds} | 38 | 2809 |
| | | | | | | A_{ds}A_{ds}G_{ds}A_{ds}GₖₛTₑₛ^{m}Cₖₛ | | |
| | | | | | | AₑₛGₖ | | |
| 1341405 | N/A | N/A | 12501 | 12516 | GCAGAAATTCACCTTG | Gₖₛ^{m}CₖₛA_{ds}G_{ds}A_{ds}A_{ds}A_{ds} | 53 | 1002 |
| | | | | | | T_{ds}T_{ds}^{m}C_{ds}A_{ds}^{m}Cₖₛ^{m}Cₑₛ | | |
| | | | | | | TₖₛTₑₛGₖ | | |
| 1341409 | N/A | N/A | 20422 | 20437 | ACAGTAAAATTATGCC | Aₖₛ^{m}CₖₛA_{ds}G_{ds}T_{ds}A_{ds}A_{ds} | 28 | 477 |
| | | | | | | A_{ds}A_{ds}T_{ds}T_{ds}AₖₛTₑₛGₖₛ | | |
| | | | | | | ^{m}Cₑₛ^{m}Cₖ | | |
| 1341411 | N/A | N/A | 14194 | 14209 | TGTGATTGAGTTCTCC | TₖₛGₖₛT_{ds}G_{ds}A_{ds}T_{ds}T_{ds} | 11 | 2020 |
| | | | | | | G_{ds}A_{ds}G_{ds}T_{ds}Tₖₛ^{m}CₑₛTₖₛ | | |
| | | | | | | ^{m}Cₑₛ^{m}Cₖ | | |
| 1341414 | N/A | N/A | 14168 | 14183 | ATAGCAAGCCAACAGA | AₖₛTₖₛA_{ds}G_{ds}^{m}C_{ds}A_{ds}A_{ds} | 23 | 2633 |
| | | | | | | G_{ds}^{m}C_{ds}^{m}C_{ds}A_{ds}Aₖₛ^{m}Cₑₛ | | |
| | | | | | | AₖₛGₑₛAₖ | | |
| 1341528 | 1075 | 1090 | 20890 | 20905 | GTGCCAAACCAATGTT | GₖₛTₖₛG_{ds}^{m}C_{ds}^{m}C_{ds}A_{ds} | 38 | 1042 |
| | | | | | | A_{ds}A_{ds}^{m}C_{ds}^{m}C_{ds}A_{ds}Aₖₛ | | |
| | | | | | | TₑₛGₖₛTₑₛTₖ | | |
| 1341536 | 801 | 816 | 15682 | 15697 | GTATTCCATCTATCAG | GₖₛTₖₛA_{ds}T_{ds}T_{ds}^{m}C_{ds} | 48 | 727 |
| | | | | | | ^{m}C_{ds}A_{ds}T_{ds}^{m}C_{ds}T_{ds}Aₖₛ | | |
| | | | | | | Tₑₛ^{m}CₖₛAₑₛGₖ | | |
| 1341537 | 791 | 806 | 15672 | 15687 | TATCAGACTTCTTACG | TₖₛAₖₛT_{ds}^{m}C_{ds}A_{ds}G_{ds}A_{ds} | 32 | 103 |
| | | | | | | ^{m}C_{ds}T_{ds}T_{ds}^{m}C_{ds}TₖₛTₑₛ | | |
| | | | | | | Aₖₛ^{m}CₑₛGₖ | | |
| 1341542 | 1319 | 1334 | 21134 | 21149 | TTGAACAGTCTTAAAC | TₖₛTₖₛG_{ds}A_{ds}A_{ds}^{M}C_{ds}A_{ds} | 37 | 422 |
| | | | | | | G_{ds}T_{ds}^{m}C_{ds}T_{ds}TₖₛAₑₛAₖₛ | | |
| | | | | | | Aₑₛ^{m}Cₖ | | |
| 1341544 | 1264 | 1279 | 21079 | 21094 | GGGAGGTAGCTTTTGT | GᵢcₛGᵢcₛG_{ds}A_{ds}G_{ds}G_{ds} | 66 | 343 |
| | | | | | | T_{ds}A_{ds}G_{ds}^{m}C_{ds}T_{ds}TₖₛTₑₛ | | |
| | | | | | | TₖₛGₑₛTₖ | | |
| 1341548 | 1384 | 1399 | 21199 | 21214 | TAGCTGTGCACTCATT | TₖₛAₖₛG_{ds}^{m}C_{ds}T_{ds}G_{ds}T_{ds} | 53 | 1981 |
| | | | | | | G_{ds}^{m}C_{ds}A_{ds}^{m}C_{ds}Tₖₛ^{m}Cₑₛ | | |
| | | | | | | AₖₛTₑₛTₖ | | |
| 1341550 | 1398 | 1413 | 21213 | 21228 | GAAACTTGATCTCTTA | GₖₛAₖₛA_{ds}A_{ds}^{m}C_{ds}T_{ds}T_{ds} | 54 | 2717 |
| | | | | | | G_{ds}A_{ds}T_{ds}^{m}C_{ds}Tₖₛ^{m}Cₑₛ | | |
| | | | | | | TₖₛTₑₛAₖ | | |
| 1341553 | 1346 | 1361 | 21161 | 21176 | TGGCATGGCTACAGAT | TₖₛGₖₛG_{ds}^{m}C_{ds}A_{ds}T_{ds}G_{ds} | 58 | 423 |
| | | | | | | G_{ds}^{m}C_{ds}T_{ds}A_{ds}^{m}CₖₛAₑₛ | | |
| | | | | | | GₖₛAₑₛTₖ | | |
| 1341559 | 1488 | 1503 | 21303 | 21318 | GTTTTGGGCTAATGAA | GₖₛTₖₛT_{ds}T_{ds}T_{ds}G_{ds}G_{ds} | 42 | 1204 |
| | | | | | | G_{ds}^{m}C_{ds}T_{ds}A_{ds}AₖₛTₑₛGₖₛ | | |
| | | | | | | AₑₛAₖ | | |
| 1341562 | 1496 | 1511 | 21311 | 21326 | GTTGCACCGTTTTGGG | GₖₛTₖₛT_{ds}G_{ds}^{m}C_{ds}A_{ds} | 35 | 1827 |
| | | | | | | ^{m}C_{ds}^{m}C_{ds}G_{ds}T_{ds}T_{ds}Tₖₛ | | |
| | | | | | | TₑₛGₖₛGₑₛGₖ | | |
| 1341571 | 1717 | 1732 | 21532 | 21547 | TCTAAACATCTCTGGG | Tₖₛ^{m}CₖₛT_{ds}A_{ds}A_{ds}A_{ds} | 21 | 2287 |
| | | | | | | ^{m}C_{ds}A_{ds}T_{ds}^{m}C_{ds}T_{ds}^{m}Cₖₛ | | |
| | | | | | | TₑₛGₖₛGₑₛGₖ | | |
| 1341586 | 2184 | 2199 | 21999 | 22014 | TGTAGTGGGAGTCGGA | TₖₛGₖₛT_{ds}A_{ds}G_{ds}T_{ds}G_{ds} | 27 | 587 |
| | | | | | | G_{ds}G_{ds}A_{ds}G_{ds}Tₖₛ^{m}CₑₛGₖₛ | | |
| | | | | | | GₑₛAₖ | | |
| 1341587 | 1726 | 1741 | 21541 | 21556 | CTAAAATTGTCTAAAC | ^{m}CₖₛTₖₛA_{ds}A_{ds}A_{ds}A_{ds}T_{ds} | 19 | 2590 |
| | | | | | | T_{ds}G_{ds}T_{ds}^{m}C_{ds}TₖₛAₑₛAₖₛ | | |
| | | | | | | Aₑₛ^{m}Cₖ | | |
| 1341590 | N/A | N/A | 9337 | 9352 | CCTCGATCCTATATAC | ^{m}Cₖₛ^{m}CₖₛT_{ds}^{m}C_{ds}G_{ds}A_{ds} | 3 | 2812 |
| | | | | | | T_{ds}^{m}C_{ds}^{m}C_{ds}T_{ds}A_{ds}Tₖₛ | | |
| | | | | | | AₑₛTₖₛAₑₛ^{m}Cₖ | | |
| 1341593 | N/A | N/A | 9961 | 9976 | TAAGCTGAGAGTTCTA | TₖₛAₖₛA_{ds}G_{ds}^{m}C_{ds}T_{ds}G_{ds} | 29 | 2499 |
| | | | | | | A_{ds}G_{ds}A_{ds}G_{ds}TₖₛTₑₛ^{m}Cₖₛ | | |
| | | | | | | TₑₛAₖ | | |
| 1341594 | N/A | N/A | 11568 | 11583 | TGACAATGGTTGATAG | TₖₛGₖₛA_{ds}^{m}C_{ds}A_{ds}A_{ds}T_{ds} | 37 | 1700 |
| | | | | | | G_{ds}G_{ds}T_{ds}T_{ds}GₖₛAₑₛTₖₛ | | |
| | | | | | | AₑₛGₖ | | |
| 1341597 | N/A | N/A | 9971 | 9986 | TTGAGTAGTGTAAGCT | TₖₛTₖₛG_{ds}A_{ds}G_{ds}T_{ds}A_{ds} | 29 | 2346 |
| | | | | | | G_{ds}T_{ds}G_{ds}T_{ds}AₖₛAₑₛGₖₛ | | |
| | | | | | | ^{m}CₑₛTₖ | | |
| 1341598 | N/A | N/A | 16282 | 16297 | TAGTCTTCAGCAAAGT | TₖₛAₖₛG_{ds}T_{ds}^{m}C_{ds}T_{ds}T_{ds} | 35 | 2632 |
| | | | | | | ^{m}C_{ds}A_{ds}G_{ds}^{m}C_{ds}AₖₛAₑₛ | | |
| | | | | | | AₖₛGₑₛTₖ | | |
| 1341599 | N/A | N/A | 16377 | 16392 | ACCAAACTTCCAGCAG | Aₖₛ^{m}Cₖₛ^{m}C_{ds}A_{ds}A_{ds}A_{ds} | 32 | 1948 |
| | | | | | | ^{m}C_{ds}T_{ds}T_{ds}^{m}C_{ds}^{m}C_{ds}Aₖₛ | | |
| | | | | | | Gₑₛ^{m}CₖₛAₑₛGₖ | | |
| 1341605 | N/A | N/A | 15491 | 15506 | TTAATGCCACCCTACC | TₖₛTₖₛA_{ds}A_{ds}T_{ds}G_{ds}^{m}C_{ds} | 11 | 2304 |
| | | | | | | ^{m}C_{ds}A_{ds}^{m}C_{ds}^{m}C_{ds}^{m}CₖₛTₑₛ | | |
| | | | | | | Aₖₛ^{m}Cₑₛ^{m}Cₖ | | |
| 1341606 | N/A | N/A | 14204 | 14219 | CAGATTATTATGTGAT | ^{m}CₖₛAₖₛG_{ds}A_{ds}T_{ds}T_{ds}A_{ds} | 31 | 2723 |
| | | | | | | T_{ds}T_{ds}A_{ds}T_{ds}GₖₛTₑₛGₖₛ | | |
| | | | | | | AₑₛTₖ | | |
| 1341609 | N/A | N/A | 17986 | 18001 | TATAGTTATCTTCTCA | TₖₛAₖₛT_{ds}A_{ds}G_{ds}T_{ds}T_{ds} | 45 | 2295 |
| | | | | | | A_{ds}T_{ds}^{m}C_{ds}T_{ds}Tₖₛ^{m}Cₑₛ^{m} | | |
| | | | | | | TₖₛCₑₛAₖ | | |
| 1341616 | N/A | N/A | 17996 | 18011 | ATGAAGTTAGTATAGT | AₖₛTₖₛG_{ds}A_{ds}A_{ds}G_{ds}T_{ds} | 34 | 1483 |
| | | | | | | T_{ds}A_{ds}G_{ds}T_{ds}AₖₛTₑₛAₖₛ | | |
| | | | | | | GₑₛTₖ | | |

TABLE 52
Inhibition of HSD17B13 RNA by modified oligonucleotides targeting SEQ ID NO.: 1, and 2

| | SEQ ID | SEQ ID | SEQ ID | SEQ ID | | | | SEQ |
|---|---|---|---|---|---|---|---|---|
| Compound | NO: 1 | NO: 1 | NO: 2 | NO: 2 | Sequence | Chemistry Notation | % | ID |
| Number | Start Site | Stop Site | Start Site | Stop Site | (5′ to 3′) | (5′ to 3′) | inhibition | NO |
| 1245927 | N/A | N/A | 3433 | 3448 | AGTAGATGGTAAGTCA | AₖₛGₖₛTₖₛA_{ds}G_{ds}A_{ds}T_{ds}G_{ds} | 79 | 121 |
| | | | | | | G_{ds}T_{ds}A_{ds}A_{ds}G_{ds}Tₖₛ^{m}CₖₛAₖ | | |
| 1246023 | N/A | N/A | 5046 | 5061 | GAGTGAATCATTCAGT | GₖₛAₖₛGₖₛT_{ds}G_{ds}A_{ds}A_{ds}T_{ds} | 89 | 1526 |
| | | | | | | ^{m}C_{ds}A_{ds}T_{ds}T_{ds}^{m}C_{ds}AₖₛGₖₛ | | |
| | | | | | | Tₖ | | |
| 1341650 | 1264 | 1279 | 21079 | 21094 | GGGAGGTAGCTTTTGT | GₖₛGₖₛGₖₛA_{ds}G_{ys}G_{ds}T_{ds}A_{ds} | 17 | 343 |
| | | | | | | G_{ds}^{m}C_{ds}T_{ds}T_{ds}T_{ds}TₖₛGₖₛTₖ | | |
| 1341653 | 1316 | 1331 | 21131 | 21146 | AACAGTCTTAAACCTT | AₖₛAₖₛ^{m}CₖₛA_{ds}G_{ys}T_{ds}^{m}C_{ds} | 75 | 188 |
| | | | | | | T_{ds}T_{ds}A_{ds}A_{ds}A_{ds}^{m}C_{ds}^{m}Cₖₛ | | |
| | | | | | | TₖₛTₖ | | |
| 1341660 | 1328 | 1343 | 21143 | 21158 | GAATGCTACTTGAACA | GₖₛAₖₛAₖₛT_{ds}G_{ys}^{m}C_{ds}T_{ds} | 48 | 1123 |
| | | | | | | A_{ds}^{m}C_{ds}T_{ds}T_{ds}G_{ds}A_{ds}Aₖₛ | | |
| | | | | | | ^{m}CₖₛAₖ | | |
| 1341664 | 1320 | 1335 | 21135 | 21150 | CTTGAACAGTCTTAAA | ^{m}CₖₛTₖₛTₖₛG_{ds}A_{ys}A_{ds}^{m}C_{ds} | 49 | 500 |
| | | | | | | A_{ds}G_{ds}T_{ds}^{m}C_{ds}T_{ds}T_{ds}Aₖₛ | | |
| | | | | | | AₖₛAₖ | | |
| 1341667 | 1312 | 1327 | 21127 | 21142 | GTCTUAAACCTTCCCT | GₖₛTₖₛ^{m}CₖₛT_{ds}U_{ys}A_{ds}A_{ds} | 35 | 2968 |
| | | | | | | A_{ds}^{m}C_{ds}^{m}C_{ds}T_{ds}T_{ds}^{m}C_{ds} | | |
| | | | | | | ^{m}Cₖₛ^{m}CₖₛTₖ | | |
| 1341670 | 1333 | 1348 | 21148 | 21163 | GATTGGAATGCTACTT | GₖₛAₖₛTₖₛT_{ds}G_{ys}G_{ds}A_{ds}A_{ds} | 48 | 1435 |
| | | | | | | T_{ds}G_{ds}^{m}C_{ds}T_{ds}A_{ds}^{m}CₖₛTₖₛ | | |
| | | | | | | Tₖ | | |
| 1341676 | 1324 | 1339 | 21139 | 21154 | GCTACTTGAACAGTCT | Gₖₛ^{m}CₖₛTₖₛA_{ds}C_{ys}T_{ds}T_{ds} | 82 | 811 |
| | | | | | | G_{ds}A_{ds}A_{ds}^{m}C_{ds}A_{ds}G_{ds}Tₖₛ | | |
| | | | | | | ^{m}CₖₛTₖ | | |
| 1341678 | 1356 | 1371 | 21171 | 21186 | TGATATTCTGTGGCAT | TₖₛGₖₛAₖₛT_{ds}A_{ys}T_{ds}T_{ds} | 61 | 1124 |
| | | | | | | ^{m}C_{ds}T_{ds}G_{ds}T_{ds}G_{ds}G_{ds}^{m}Cₖₛ | | |
| | | | | | | AₖₛTₖ | | |
| 1341680 | 1347 | 1362 | 21162 | 21177 | GTGGCATGGCTACAGA | GᵢₛₛTₖₛGᵢₛₛG_{ds}C_{ys}A_{ds}T_{ds} | 49 | 501 |
| | | | | | | G_{ds}G_{ds}^{m}C_{ds}T_{ds}A_{ds}^{m}C_{ds}Aₖₛ | | |
| | | | | | | GₖₛAₖ | | |
| 1341683 | 1340 | 1355 | 21155 | 21170 | GGCTACAGATTGGAAT | GₖₛGₖₛ^{m}CₖₛT_{ds}A_{ys}^{m}C_{ds}A_{ds} | 40 | 1980 |
| | | | | | | G_{ds}A_{ds}T_{ds}T_{ds}G_{ds}G_{ds}AₖₛAₖₛ | | |
| | | | | | | Tₖ | | |
| 1341690 | 1364 | 1379 | 21179 | 21194 | GTTCUTGTTGATATTC | GₖₛTₖₛTₖₛ^{m}C_{ds}U_{ys}T_{ds}G_{ds} | 70 | 2969 |
| | | | | | | T_{ds}T_{ds}G_{ds}A_{ds}T_{ds}A_{ds}TₖₛTₖₛ | | |
| | | | | | | ^{m}Cₖ | | |
| 1341696 | 1352 | 1367 | 21167 | 21182 | ATTCUGTGGCATGGCT | AₖₛTₖₛTₖₛ^{m}C_{ds}U_{ys}G_{ds}T_{ds} | 59 | 2970 |
| | | | | | | G_{ds}G_{ds}^{m}C_{ds}A_{ds}T_{ds}G_{ds}Gₖₛ | | |
| | | | | | | ^{m}CₖₛTₖ | | |
| 1341699 | 1387 | 1402 | 21202 | 21217 | TCTTAGCTGTGCACTC | Tₖₛ^{m}CₖₛTₖₛT_{ds}A_{ys}G_{ds}^{m}C_{ds} | 71 | 190 |
| | | | | | | T_{ds}G_{ds}T_{ds}G_{ds}^{m}C_{ds}A_{ds}^{m}Cₖₛ | | |
| | | | | | | Tₖₛ^{m}Cₖ | | |
| 1341705 | 1393 | 1408 | 21208 | 21223 | TTGAUCTCTTAGCTGT | TₖₛTₖₛGₖₛA_{ds}U_{ys}^{m}C_{ds}T_{ds} | 50 | 2971 |
| | | | | | | ^{m}C_{ds}T_{ds}T_{ds}A_{ds}G_{ds}^{m}C_{ds}Tₖₛ | | |
| | | | | | | GₖₛTₖ | | |
| 1341711 | 1420 | 1435 | 21235 | 21250 | GGTTGAGATAAAGCTG | GₖₛGₖₛTₖₛT_{ds}G_{ys}A_{ds}G_{ds}A_{ds} | 57 | 1826 |
| | | | | | | T_{ds}A_{ds}A_{ds}A_{ds}G_{ds}^{m}CₖₛTₖₛGₖ | | |
| 1341714 | 1425 | 1440 | 21240 | 21255 | GTCCAGGTTGAGATAA | GₖₛTₖₛ^{m}Cₖₛ^{m}C_{ds}A_{ys}G_{ds}G_{ds} | 68 | 113 |
| | | | | | | T_{ds}T_{ds}G_{ds}A_{ds}G_{ds}A_{ds}TₖₛAₖₛ | | |
| | | | | | | Aₖ | | |
| 1341718 | 1461 | 1476 | 21276 | 21291 | CTAGGGAAATCTTTCA | ^{m}CₖₛTₖₛAₖₛG_{ds}G_{ys}G_{ds}A_{ds} | 19 | 659 |
| | | | | | | A_{ds}A_{ds}T_{ds}^{m}C_{ds}T_{ds}T_{ds}Tₖₛ | | |
| | | | | | | ^{m}CₖₛAₖ | | |
| 1341721 | 693 | 708 | 12111 | 12126 | ATGAGGTTTTGATACC | AₖₛTₖₛGₖₛA_{ds}G_{ys}G_{ds}T_{ds}T_{ds} | 49 | 569 |
| | | | | | | T_{ds}T_{ds}G_{ds}A_{ds}T_{ds}Aₖₛ^{m}Cₖₛ | | |
| | | | | | | ^{m}Cₖ | | |
| 1341725 | 1415 | 1430 | 21230 | 21245 | AGATAAAGCTGCCTGC | AₖₛGₖₛAₖₛT_{ds}A_{ys}A_{ds}A_{ds}G_{ds} | 35 | 1515 |
| | | | | | | ^{m}C_{ds}T_{ds}G_{ds}^{m}C_{ds}^{m}C_{ds}TₖₛGₖₛ | | |
| | | | | | | ^{m}Cₖ | | |
| 1341728 | 1489 | 1504 | 21304 | 21319 | CGTTUTGGGCTAATGA | ^{m}cₖₛGₖₛTₖₛT_{ds}U_{ys}T_{ds}G_{ds} | 34 | 2972 |
| | | | | | | G_{ds}G_{ds}^{m}C_{ds}T_{ds}A_{ds}A_{ds}Tₖₛ | | |
| | | | | | | GₖₛAₖ | | |
| 1341731 | 1497 | 1512 | 21312 | 21327 | AGTTGCACCGTTTTGG | AₖₛGₖₛTₖₛT_{ds}G_{ys}^{m}C_{ds}A_{ds} | 38 | 1905 |
| | | | | | | ^{m}C_{ds}^{m}C_{ds}G_{ds}T_{ds}T_{ds}T_{ds}Tₖₛ | | |
| | | | | | | GₖₛGₖ | | |
| 1341736 | 1493 | 1508 | 21308 | 21323 | GCACCGTTTTGGGCTA | Gₖₛ^{m}CₖₛAₖₛ^{m}C_{ds}C_{ys}G_{ds}T_{ds} | 67 | 1593 |
| | | | | | | T_{ds}T_{ds}T_{ds}G_{ds}G_{ds}G_{ds}^{m}Cₖₛ | | |
| | | | | | | TₖₛAₖ | | |
| 1341738 | 1622 | 1637 | 21437 | 21452 | AGAGUCGGTCACCTTT | AₖₛGₖₛAₖₛG_{ds}U_{ys}^{m}C_{ds}G_{ds} | 55 | 2973 |
| | | | | | | G_{ds}T_{ds}^{m}C_{ds}A_{ds}^{m}C_{ds}^{m}C_{ds}Tₖₛ | | |
| | | | | | | TₖₛTₖ | | |
| 1341744 | 1504 | 1519 | 21319 | 21334 | AGAAUAGAGTTGCACC | AₖₛGₖₛAₖₛA_{ds}U_{ys}A_{ds}G_{ds}A_{d} | 49 | 2974 |
| | | | | | | ₛG_{ds}T_{ds}T_{ds}G_{ds}^{m}C_{ds}Aₖₛ^{m}Cₖₛ | | |
| | | | | | | ^{m}Cₖ | | |
| 1341748 | 1614 | 1629 | 21429 | 21444 | TCACCTTTCATAATGT | Tₖₛ^{m}CₖₛAₖₛ^{m}C_{ds}C_{ys}T_{ds}T_{ds}T | 47 | 2109 |
| | | | | | | _{ds}^{m}C_{ds}A_{ds}T_{ds}A_{ds}A_{ds}TₖₛGₖₛ | | |
| | | | | | | Tₖ | | |
| 1341754 | 1618 | 1633 | 21433 | 21448 | TCGGUCACCTTTCATA | Tₖₛ^{m}CₖₛGₖₛG_{ds}U_{ys}^{m}C_{ds}A_{ds} | 21 | 2975 |
| | | | | | | ^{m}C_{ds}^{m}C_{ds}T_{ds}T_{ds}T_{ds}^{m}C_{ds}Aₖₛ | | |
| | | | | | | TₖₛAₖ | | |
| 1341761 | 1630 | 1645 | 21445 | 21460 | TTTAAAATAGAGTCGG | TₖₛTₖₛTₖₛA_{ds}A_{ys}A_{ds}A_{ds}T_{ds} | 77 | 1051 |
| | | | | | | A_{ds}G_{ds}A_{ds}G_{ds}T_{ds}^{m}CₖₛGₖₛGₖ | | |
| 1341764 | 1626 | 1641 | 21441 | 21456 | AAATAGAGTCGGTCAC | AₖₛAₖₛAₖₛT_{ds}A_{ys}G_{ds}A_{ds}G_{ds} | 63 | 740 |
| | | | | | | T_{ds}^{m}C_{ds}G_{ds}G_{ds}T_{ds}^{m}CₖₛAₖₛ | | |
| | | | | | | ^{m}Cₖ | | |
| 1341767 | 1714 | 1729 | 21529 | 21544 | AAACATCTCTGGGACC | AₖₛAₖₛAₖₛ^{m}C_{ds}A_{ys}T_{ds}^{m}C_{ds} | 66 | 2129 |
| | | | | | | T_{ds}^{m}C_{ds}T_{ds}G_{ds}G_{ds}G_{ds}Aₖₛ | | |
| | | | | | | ^{m}Cₖₛ^{m}Cₖ | | |
| 1341768 | 1710 | 1725 | 21525 | 21540 | ATCTCTGGGACCAAGG | AₖₛTₖₛ^{m}CₖₛT_{ds}C_{ys}T_{ds}G_{ds} | 52 | 37 |
| | | | | | | G_{ds}G_{ds}A_{ds}^{m}C_{ds}^{m}C_{ds}A_{ds}Aₖₛ | | |
| | | | | | | GₖₛGₖ | | |
| 1341773 | 1718 | 1733 | 21533 | 21548 | GTCTAAACATCTCTGG | GₖₛTₖₛ^{m}CₖₛT_{ds}A_{ys}A_{ds}A_{ds} | 47 | 429 |
| | | | | | | ^{m}C_{ds}A_{ds}T_{ds}^{m}C_{ds}T_{ds}^{m}C_{ds}Tₖₛ | | |
| | | | | | | GₖₛGₖ | | |
| 1341781 | 1768 | 1783 | 21583 | 21598 | CCAGUACAGTTCCTTT | ^{m}Cₖₛ^{m}CₖₛAₖₛG_{ds}U_{ys}A_{ds}^{m}C_{ds} | 51 | 2976 |
| | | | | | | A_{ds}G_{ds}T_{ds}T_{ds}^{m}C_{ds}^{m}C_{ds}Tₖₛ | | |
| | | | | | | TₖₛTₖ | | |
| 1341783 | 1750 | 1765 | 21565 | 21580 | CTGTGTTAGCTTTAAT | ^{m}CₖₛTₖₛGₖₛT_{ds}G_{ys}T_{ds}T_{ds} | 41 | 1286 |
| | | | | | | A_{ds}G_{ds}^{m}C_{ds}T_{ds}T_{ds}T_{ds}Aₖₛ | | |
| | | | | | | AₖₛTₖ | | |
| 1341787 | 794 | 809 | 15675 | 15690 | ATCTATCAGACTTCTT | AₖₛTₖₛ^{m}CₖₛT_{ds}A_{ys}T_{ds}^{m}C_{ds} | 34 | 2728 |
| | | | | | | A_{ds}G_{ds}A_{ds}^{m}C_{ds}T_{ds}T_{ds}^{m}Cₖₛ | | |
| | | | | | | TₖₛTₖ | | |
| 1341789 | 1778 | 1793 | 21593 | 21608 | TATGUAATAGCCAGTA | TₖₛAₖₛTₖₛG_{ds}U_{ys}A_{ds}A_{ds}T_{ds} | 43 | 2977 |
| | | | | | | A_{ds}G_{ds}^{m}C_{ds}^{m}C_{ds}A_{ds}GₖₛTₖₛ | | |
| | | | | | | Aₖ | | |
| 1341792 | 1774 | 1789 | 21589 | 21604 | TAATAGCCAGTACAGT | TₖₛAₖₛAₖₛT_{ds}A_{ys}G_{ds}^{m}C_{ds} | 51 | 196 |
| | | | | | | ^{m}C_{ds}A_{ds}G_{ds}T_{ds}A_{ds}^{m}C_{ds}Aₖₛ | | |
| | | | | | | GₖₛTₖ | | |
| 1341801 | 2186 | 2201 | 22001 | 22016 | GATGUAGTGGGAGTCG | GₖₛAₖₛTₖₛG_{ds}U_{ys}A_{ds}G_{ds}T_{ds} | 35 | 2978 |
| | | | | | | G_{ds}G_{ds}G_{ds}A_{ds}G_{ds}Tₖₛ^{m}CₖₛGₖ | | |
| 1341806 | 2193 | 2208 | 22008 | 22023 | TAGTCTTGATGTAGTG | TₖₛAₖₛGₖₛT_{ds}C_{ys}T_{ds}T_{ds}G_{ds} | 56 | 1288 |
| | | | | | | A_{ds}T_{ds}G_{ds}T_{ds}A_{ds}GₖₛTₖₛGₖ | | |
| 1341807 | 1782 | 1797 | 21597 | 21612 | TTCTUATGTAATAGCC | TₖₛTₖₛ^{m}CₖₛT_{ds}U_{ys}A_{ds}T_{ds} | 66 | 2979 |
| | | | | | | G_{ds}T_{ds}A_{ds}A_{ds}T_{ds}A_{ds}Gₖₛ | | |
| | | | | | | ^{m}Cₖₛ^{m}Cₖ | | |
| 1341816 | 2257 | 2272 | 22072 | 22087 | AAACAAGAGGATAGTC | AₖₛAₖₛAₖₛ^{m}C_{ds}A_{ys}A_{ds}G_{ds} | 53 | 744 |
| | | | | | | A_{ds}G_{ds}G_{ds}A_{ds}T_{ds}A_{ds}GₖₛTₖₛ | | |
| | | | | | | ^{m}Cₖ | | |
| 1341817 | 2247 | 2262 | 22062 | 22077 | ATAGUCCATGCAAAAG | AₖₛTₖₛAₖₛG_{ds}U_{ys}^{m}C_{ds}^{m}C_{ds} | 57 | 2980 |
| | | | | | | A_{ds}T_{ds}G_{ds}^{m}C_{ds}A_{ds}A_{ds}Aₖₛ | | |
| | | | | | | AₖₛGₖ | | |
| 1341820 | N/A | N/A | 9511 | 9526 | AATAUTGAGGCACTGG | AₖₛAₖₛTₖₛA_{ds}U_{ys}T_{ds}G_{ds}A_{ds} | 48 | 2981 |
| | | | | | | G_{ds}G_{ds}^{m}C_{ds}A_{ds}^{m}C_{ds}TₖₛGₖₛ | | |
| | | | | | | Gₖ | | |
| 1341827 | N/A | N/A | 9330 | 9345 | CCTAUATACATCCAAG | ^{m}Cₖₛ^{m}CₖₛTₖₛA_{ds}U_{ys}A_{ds}T_{ds} | 39 | 2982 |
| | | | | | | A_{ds}^{m}C_{ds}A_{ds}T_{ds}^{m}C_{ds}^{m}C_{ds}Aₖₛ | | |
| | | | | | | AₖₛGₖ | | |
| 1341830 | N/A | N/A | 9598 | 9613 | ATGTGAAGAGCTGGTA | AₖₛTₖₛGₖₛT_{ds}G_{ys}A_{ds}A_{ds}G_{ds} | 26 | 527 |
| | | | | | | A_{ds}G_{ds}^{m}C_{ds}T_{ds}G_{ds}GₖₛTₖₛAₖ | | |
| 1341832 | N/A | N/A | 9964 | 9979 | GTGTAAGCTGAGAGTT | GₖₛTₖₛGₖₛT_{ds}A_{ys}A_{ds}G_{ds} | 55 | 2760 |
| | | | | | | ^{m}C_{ds}T_{ds}G_{ds}A_{ds}G_{ds}A_{ds}Gₖₛ | | |
| | | | | | | TₖₛTₖ | | |
| 1341840 | N/A | N/A | 11543 | 11558 | TGACAATGGTTGCCAC | TₖₛGₖₛAₖₛ^{m}C_{ds}A_{ys}A_{ds}T_{ds} | 55 | 1233 |
| | | | | | | G_{ds}G_{ds}T_{ds}T_{ds}G_{ds}^{m}C_{ds}^{m}Cₖₛ | | |
| | | | | | | Aₖₛ^{m}Cₖ | | |
| 1341842 | N/A | N/A | 11548 | 11563 | TCTCUTGACAATGGTT | Tₖₛ^{m}CₖₛTₖₛ^{m}C_{ds}U_{ys}T_{ds}G_{ds} | 62 | 2983 |
| | | | 11573 | 11588 | | A_{ds}^{m}C_{ds}A_{ds}A_{ds}T_{ds}G_{ds}Gₖₛ | | |
| | | | | | | TₖₛTₖ | | |
| 1341845 | N/A | N/A | 11858 | 11873 | GATTAAGCAGAATTGT | GₖₛAₖₛTₖₛT_{ds}A_{ys}A_{ds}G_{ds} | 28 | 1156 |
| | | | | | | ^{m}C_{ds}A_{ds}G_{ds}A_{ds}A_{ds}T_{ds}Tₖₛ | | |
| | | | | | | GₖₛTₖ | | |
| 1341847 | 805 | 820 | 15686 | 15701 | GTAAGTATTCCATCTA | GₖₛTₖₛAₖₛA_{ds}G_{ys}T_{ds}A_{ds}T_{ds} | 43 | 1038 |
| | | | | | | T_{ds}^{m}C_{ds}^{m}C_{ds}A_{ds}T_{ds}^{m}CₖₛTₖₛ | | |
| | | | | | | Aₖ | | |
| 1341851 | N/A | N/A | 14196 | 14211 | TATGUGATTGAGTTCT | TₖₛAₖₛTₖₛG_{ds}U_{ys}G_{ds}A_{ds}T_{ds} | 21 | 2984 |
| | | | | | | T_{ds}G_{ds}A_{ds}G_{ds}T_{ds}Tₖₛ^{m}CₖₛTₖ | | |
| 1341853 | N/A | N/A | 12416 | 12431 | ACGGUGATCAAATGTA | Aₖₛ^{m}CₖₛGₖₛG_{ds}U_{ys}G_{ds}A_{ds}T | 18 | 2985 |
| | | | | | | _{ds}^{m}C_{ds}A_{ds}A_{ds}A_{ds}T_{ds}GₖₛTₖₛ | | |
| | | | | | | Aₖ | | |
| 1341855 | N/A | N/A | 12426 | 12441 | CAGGGTGGTAACGGTG | ^{m}CₖₛAₖₛGₖₛG_{ds}G_{ys}T_{ds}G_{ds} | 29 | 2729 |
| | | | | | | G_{ds}T_{ds}A_{ds}A_{ds}^{m}C_{ds}G_{ds}Gₖₛ | | |
| | | | | | | TₖₛGₖ | | |
| 1341860 | N/A | N/A | 16134 | 16149 | GATGCTCCATAATAAT | GₖₛAₖₛTₖₛG_{ds}C_{ys}T_{ds}^{m}C_{ds} | 24 | 2049 |
| | | | | | | ^{m}C_{ds}A_{ds}T_{ds}A_{ds}A_{ds}T_{ds}Aₖₛ | | |
| | | | | | | AₖₛTₖ | | |
| 1341861 | N/A | N/A | 14914 | 14929 | ACATUAGCAAGCTAAG | Aₖₛ^{m}CₖₛAₖₛT_{ds}U_{ys}A_{ds}G_{ds} | 23 | 2986 |
| | | | | | | ^{m}C_{ds}A_{ds}A_{ds}G_{ds}^{m}C_{ds}T_{ds}Aₖₛ | | |
| | | | | | | AₖₛGₖ | | |
| 1341862 | N/A | N/A | 15494 | 15509 | GCATUAATGCCACCCT | Gₖₛ^{m}CₖₛAₖₛT_{ds}U_{ys}A_{ds}A_{ds} | 32 | 2987 |
| | | | | | | T_{ds}G_{ds}^{m}C_{ds}^{m}C_{ds}A_{ds}^{m}C_{ds} | | |
| | | | | | | ^{m}Cₖₛ^{m}CₖₛTₖ | | |
| 1341870 | N/A | N/A | 16287 | 16302 | TAGAATAGTCTTCAGC | TₖₛAₖₛGₖₛA_{ds}A_{ys}T_{ds}A_{ds}G_{ds} | 30 | 1403 |
| | | | | | | T_{ds}^{m}C_{ds}T_{ds}T_{ds}^{m}C_{ds}AₖₛGₖₛ | | |
| | | | | | | ^{m}Cₖ | | |
| 1341877 | N/A | N/A | 16124 | 16139 | AATAATAGCTCTATTG | AₖₛAₖₛTₖₛA_{ds}A_{ys}T_{ds}A_{ds}G_{ds} | 16 | 2410 |
| | | | | | | ^{m}C_{ds}T_{ds}^{m}C_{ds}T_{ds}A_{ds}TₖₛTₖₛ | | |
| | | | | | | Gₖ | | |
| 1341882 | N/A | N/A | 17992 | 18007 | AGTTAGTATAGTTATC | AGₖₛTₖₛT_{ds}A_{ys}G_{ds}T_{ds}A_{ds} | 42 | 1249 |
| | | | | | | T_{ds}A_{dS}G_{ds}T_{ds}T_{ds}AₖₛTₖₛ^{m}Cₖ | | |
| 1341887 | N/A | N/A | 16380 | 16395 | CCAACCAAACTTCCAG | ^{m}Cₖₛ^{m}CₖₛAₖₛA_{ds}C_{ys}^{m}C_{ds}A_{ds} | 30 | 2539 |
| | | | | | | A_{ds}A_{ds}^{m}C_{ds}T_{ds}T_{ds}^{m}C_{ds}^{m}Cₖₛ | | |
| | | | | | | AₖₛGₖ | | |
| 1341889 | N/A | N/A | 17987 | 18002 | GTATAGTTATCTTCTC | GₖₛTₖₛAₖₛT_{ds}A_{ys}G_{ds}T_{ds}T_{ds} | 54 | 937 |
| | | | | | | A_{ds}T_{ds}^{m}C_{ds}T_{ds}T_{ds}^{m}CₖₛTₖₛ | | |
| | | | | | | ^{m}Cₖ | | |
| 1341890 | 1082 | 1097 | 20897 | 20912 | GCTGCTAGTGCCAAAC | Gₖₛ^{m}CₖₛTₖₛG_{ds}C_{ys}T_{ds}A_{ds} | 39 | 1587 |
| | | | | | | G_{ds}T_{ds}G_{ds}^{m}C_{ds}^{m}C_{ds}A_{ds}Aₖₛ | | |
| | | | | | | Aₖₛ^{m}Cₖ | | |
| 1341895 | N/A | N/A | 18099 | 18114 | CTGAAATTGATACACC | ^{m}CₖₛTₖₛGₖₛA_{ds}A_{ys}A_{ds}T_{ds} | 71 | 393 |
| | | | | | | T_{ds}G_{ds}A_{ds}T_{ds}A_{ds}^{m}C_{ds}Aₖₛ | | |
| | | | | | | ^{m}Cₖₛ^{m}Cₖ | | |
| 1341896 | N/A | N/A | 17997 | 18012 | TATGAAGTTAGTATAG | TₖₛAₖₛTₖₛG_{ds}A_{ys}A_{ds}G_{ds}T_{ds} | 27 | 1560 |
| | | | | | | T_{ds}A_{ds}G_{ds}T_{ds}A_{ds}TₖₛAₖₛGₖ | | |
| 1341900 | N/A | N/A | 19911 | 19926 | GCATCTTAAGATACCC | Gₖₛ^{m}CₖₛAₖₛT_{ds}C_{ys}T_{ds}T_{ds} | 65 | 553 |
| | | | | | | A_{ds}A_{ds}G_{ds}A_{ds}T_{ds}A_{ds}^{m}Cₖₛ | | |
| | | | | | | ^{m}Cₖₛ^{m}Cₖ | | |
| 1341907 | N/A | N/A | 18697 | 18712 | CAAAAGACTTTGAGAC | ^{m}CₖₛAₖₛAₖₛA_{ds}A_{ys}G_{ds}A_{ds} | 25 | 2186 |
| | | | | | | ^{m}C_{ds}T_{ds}T_{ds}T_{ds}G_{ds}A_{ds}Gₖₛ | | |
| | | | | | | Aₖₛ^{m}Cₖ | | |
| 1341908 | N/A | N/A | 19915 | 19930 | GAGTGCATCTTAAGAT | GₖₛAₖₛGₖₛT_{ds}G_{ys}^{m}C_{ds}A_{ds} | 7 | 2256 |
| | | | | | | T_{ds}^{m}C_{ds}T_{ds}T_{ds}A_{ds}A_{ds}Gₖₛ | | |
| | | | | | | AₖₛTₖ | | |
| 1341914 | N/A | N/A | 19907 | 19922 | CTTAAGATACCCAGGT | ^{m}CₖₛTₖₛTₖₛA_{ds}A_{ys}G_{ds}A_{ds} | 50 | 241 |
| | | | | | | T_{ds}A_{ds}^{m}C_{ds}^{m}C_{ds}^{m}C_{ds}A_{ds} | | |
| | | | | | | GₖₛGₖₛTₖ | | |
| 1341919 | N/A | N/A | 20109 | 20124 | AAGACATTCTAGCCTG | AₖₛAₖₛGₖₛA_{ds}C_{ys}A_{ds}T_{ds}T_{ds} | 54 | 2744 |
| | | | | | | ^{m}C_{ds}T_{ds}A_{ds}G_{ds}^{m}C_{ds}^{m}CₖₛTₖₛ | | |
| | | | | | | Gₖ | | |
| 1341923 | N/A | N/A | 20119 | 20134 | TTACAGCATCAAGACA | TₖₛTₖₛAₖₛ^{m}C_{ds}A_{ys}G_{ds}^{m}C_{ds} | 46 | 2409 |
| | | | | | | A_{ds}T_{ds}^{m}C_{ds}A_{ds}A_{ds}G_{ds}Aₖₛ | | |
| | | | | | | ^{m}CₖₛAₖ | | |
| 1341924 | 1078 | 1093 | 20893 | 20908 | CTAGUGCCAAACCAAT | ^{m}CₖₛTₖₛAₖₛG_{ds}U_{ys}G_{ds}^{m}C_{ds} | 45 | 2988 |
| | | | | | | ^{m}C_{ds}A_{ds}A_{ds}A_{ds}^{m}C_{ds}^{m}C_{ds} | | |
| | | | | | | AₖₛAₖₛTₖ | | |
| 1341928 | N/A | N/A | 20194 | 20209 | TTGCAGTTATTAGAAG | TₖₛTₖₛGₖₛ^{m}C_{ds}A_{ys}G_{ds}T_{ds} | 17 | 2123 |
| | | | | | | T_{ds}A_{ds}T_{ds}T_{ds}A_{ds}G_{ds}Aₖₛ | | |
| | | | | | | AₖₛGₖ | | |
| 1341930 | N/A | N/A | 20383 | 20398 | GTAAUCACAAGTAAGG | GₖₛTₖₛAₖₛA_{ds}U_{ys}^{m}C_{ds}A_{ds} | 20 | 2989 |
| | | | | | | ^{m}C_{ds}A_{ds}A_{ds}G_{ds}T_{ds}A_{ds}Aₖₛ | | |
| | | | | | | GₖₛGₖ | | |
| 1341941 | N/A | N/A | 20489 | 20504 | CATAACTTCATAGTGG | ^{m}CₖₛAₖₛTₖₛA_{ds}A_{ys}^{m}C_{ds}T_{ds} | 38 | 866 |
| | | | | | | T_{ds}^{m}C_{ds}A_{ds}T_{ds}A_{ds}G_{ds}Tₖₛ | | |
| | | | | | | GₖₛGₖ | | |
| 1341942 | 1074 | 1089 | 20889 | 20904 | TGCCAAACCAATGTTT | TₖₛGₖₛ^{m}Cₖₛ^{m}C_{ds}A_{ys}A_{ds}A_{ds} | 35 | 2673 |
| | | | | | | ^{m}C_{ds}^{m}C_{ds}A_{ds}A_{ds}T_{ds}G_{ds}Tₖₛ | | |
| | | | | | | TₖₛTₖ | | |
| 1341948 | N/A | N/A | 12503 | 12518 | TTGCAGAAATTCACCT | TₖₛTₖₛGₖₛ^{m}C_{ds}A_{ys}G_{ds}A_{ds} | 29 | 2528 |
| | | | | | | A_{ds}A_{ds}T_{ds}T_{ds}^{m}C_{ds}A_{ds}^{m}Cₖₛ | | |
| | | | | | | ^{m}CₖₛTₖ | | |
| 1341953 | 1086 | 1101 | 20901 | 20916 | GACTGCTGCTAGTGCC | GₖₛAₖₛ^{m}CₖₛT_{ds}G_{ys}^{m}C_{ds}T_{ds} | 60 | 1899 |
| | | | | | | G_{ds}^{m}C_{ds}T_{ds}A_{ds}G_{ds}T_{ds}Gₖₛ^{m} | | |
| | | | | | | Cₖₛ^{m}Cₖ | | |
| 1341957 | N/A | N/A | 20479 | 20494 | TAGTGGACTTCATTAG | TₖₛAₖₛGₖₛT_{ds}G_{ys}G_{ds}A_{ds} | 34 | 2351 |
| | | | | | | ^{m}C_{ds}T_{ds}T_{ds}^{m}C_{ds}A_{ds}T_{ds}Tₖₛ | | |
| | | | | | | AₖₛGₖ | | |

### Example 5: Dose-Dependent Inhibition of Human HSD17B13 in HepaRG Cells by Modified Oligonucleotides

[0526] Certain modified oligonucleotides described in the studies above exhibiting significant in vitro inhibition of HSD17B13 RNA were selected and tested at various doses in HepaRG cells.

[0527] The modified oligonucleotides were tested in a series of experiments using the same culture conditions. The results for each experiment are presented in separate tables shown below. Cultured HepaRG cells at a density of 30,000-35,000 cells per well were transfected using electroporation with modified oligonucleotides diluted to different concentrations as specified in the tables below. After a treatment period of approximately 24 hours, HSD17B13 RNA levels were measured as previously described using the Human HSD17B13 primer-probe set RTS43553. HSD17B13 RNA levels were normalized to total RNA content, as measured by human GAPDH. Results are presented in the tables below as percent inhibition of HSD17B13, relative to untreated control cells. Data indicated as “N.D.” (no data) means that no data is available for that treatment with that compound.

[0528] The half maximal inhibitory concentration (IC₅₀) of each modified oligonucleotide was calculated using a linear regression on a log/linear plot of the data in excel and is also presented in the Tables below.

TABLE 53
Multi-dose assay of modified oligonucleotides in HepaRG cells

| | % inhibition HSD17B13 | | | | | |
|---|---|---|---|---|---|---|
| ION | | | | | | IC₅₀ |
| No. | 20 nM | 78 nM | 313 nM | 1250 nM | 5000 nM | (μM) |
| 1245094 | 0 | 5 | 75 | 68 | N.D. | 0.3 |
| 1245641 | 5 | 16 | 52 | 75 | 80 | 0.4 |
| 1245744 | 5 | 11 | 40 | 81 | 87 | 0.4 |
| 1245822 | 0 | 0 | 57 | 78 | 93 | 0.1 |
| 1245901 | 1 | 14 | 38 | 55 | 78 | 0.8 |
| 1245927 | 8 | 42 | 76 | 83 | 92 | 0.2 |
| 1245952 | 25 | 34 | 51 | 70 | 86 | 0.2 |
| 1245979 | 4 | 0 | 38 | 64 | 75 | 0.8 |
| 1246005 | 1 | 14 | 60 | 64 | 78 | 0.5 |
| 1246134 | 0 | 50 | 75 | 79 | N.D. | 0.2 |
| 1246135 | 10 | 10 | 42 | 68 | 88 | 0.5 |
| 1246161 | 18 | 20 | 63 | 75 | 86 | 0.3 |
| 1246550 | 14 | 28 | 58 | 76 | 88 | 0.3 |
| 1246706 | 60 | 69 | 68 | 76 | N.D. | 0.02 |

TABLE 54
Multi-dose assay of modified oligonucleotides in HepaRG cells

| | % inhibition HSD17B13 | | | | | |
|---|---|---|---|---|---|---|
| ION | | | | | | IC₅₀ |
| No. | 20 nM | 78 nM | 313 nM | 1250 nM | 5000 nM | (μM) |
| 1245096 | 3 | 17 | 70 | 85 | N.D. | 0.2 |
| 1245097 | 4 | 40 | 75 | 80 | 76 | 0.2 |
| 1245565 | 2 | 0 | 26 | 56 | 65 | 1.5 |
| 1245798 | 16 | 37 | 57 | 82 | 90 | 0.2 |
| 1245825 | 0 | 11 | 44 | 64 | 81 | 0.6 |
| 1245851 | 0 | 9 | 45 | 69 | 84 | 0.6 |
| 1245927 | 0 | 25 | 56 | 79 | 82 | 0.4 |
| 1245928 | 7 | 42 | 67 | 89 | 95 | 0.2 |
| 1245980 | 12 | 43 | 94 | 84 | N.D. | 0.1 |
| 1246059 | 1 | 15 | 44 | 68 | 81 | 0.5 |
| 1246084 | 4 | 18 | 69 | 89 | 93 | 0.2 |
| 1246110 | 10 | 41 | 71 | 90 | N.D. | 0.1 |
| 1246111 | 0 | 22 | 44 | 79 | 83 | 0.4 |
| 1246162 | 33 | 31 | 71 | 88 | 94 | 0.1 |
| 1246163 | 1 | 17 | 42 | 73 | 92 | 0.4 |

TABLE 55
Multi-dose assay of modified oligonucleotides in HepaRG cells

| | % inhibition HSD17B13 | | | | | |
|---|---|---|---|---|---|---|
| ION | | | | | | IC₅₀ |
| No. | 19 nM | 78 nM | 313 nM | 1250 nM | 5000 nM | (μM) |
| 1245098 | 25 | 27 | 71 | 80 | 71 | 0.2 |
| 1245463 | 0 | 0 | 20 | 63 | 78 | 0.9 |
| 1245696 | 15 | 30 | 52 | 74 | 89 | 0.3 |
| 1245800 | 0 | 30 | 55 | 82 | 82 | 0.3 |
| 1245904 | 12 | 19 | 51 | 73 | 97 | 0.3 |
| 1245927 | 3 | 11 | 48 | 68 | 76 | 0.6 |
| 1245930 | 7 | 26 | 58 | 77 | 89 | 0.3 |
| 1245957 | 0 | 0 | 54 | 75 | 86 | 0.5 |
| 1245982 | 7 | 25 | 45 | 78 | 92 | 0.3 |
| 1245983 | 0 | 18 | 42 | 67 | 90 | 0.5 |
| 1246035 | 0 | 2 | 51 | 73 | 75 | 0.6 |
| 1246113 | 12 | 0 | 47 | 75 | 84 | 0.6 |
| 1247023 | 0 | 23 | 46 | 75 | 90 | 0.4 |
| 1247048 | 9 | 22 | 41 | 74 | 84 | 0.4 |
| 1247075 | 0 | 0 | 4 | 50 | 68 | 2.0 |

TABLE 56
Multi-dose assay of modified oligonucleotides in HepaRG cells

| | % inhibition HSD17B13 | | | | | |
|---|---|---|---|---|---|---|
| ION | | | | | | IC₅₀ |
| No. | 20 nM | 78 nM | 313 nM | 1250 nM | 5000 nM | (μM) |
| 1245075 | 20 | 50 | 62 | 75 | 86 | 0.1 |
| 1245829 | 18 | 33 | 58 | 83 | 94 | 0.2 |
| 1245855 | 16 | 21 | 59 | 78 | 89 | 0.3 |
| 1245927 | 0 | 21 | 54 | 69 | 76 | 0.5 |
| 1245932 | 22 | 24 | 56 | 90 | 94 | 0.2 |
| 1245933 | 23 | 24 | 63 | 76 | 89 | 0.2 |
| 1245958 | 12 | 31 | 43 | 87 | 84 | 0.3 |
| 1245959 | 1 | 10 | 46 | 65 | 90 | 0.5 |
| 1245984 | 9 | 37 | 62 | 76 | 93 | 0.2 |
| 1246036 | 15 | 33 | 65 | 80 | 95 | 0.2 |
| 1246063 | 16 | 29 | 53 | 84 | 85 | 0.2 |
| 1246115 | 0 | 38 | 66 | 88 | 92 | 0.2 |
| 1246140 | 20 | 2 | 54 | 75 | 86 | 0.5 |
| 1246192 | 0 | 17 | 52 | 72 | 89 | 0.5 |
| 1247024 | 16 | 45 | 82 | 89 | 97 | 0.1 |

TABLE 57
Multi-dose assay of modified oligonucleotides in HepaRG cells

| | % inhibition HSD17B13 | | | | | |
|---|---|---|---|---|---|---|
| ION | | | | | | IC₅₀ |
| No. | 20 nM | 78 nM | 313 nM | 1250 nM | 5000 nM | (μM) |
| 1245076 | 0 | 0 | 32 | 66 | 83 | 0.6 |
| 1245415 | 0 | 0 | 22 | 65 | 88 | 0.9 |
| 1245649 | 8 | 23 | 49 | 79 | 97 | 0.3 |
| 1245857 | 0 | 2 | 35 | 74 | 91 | 0.6 |
| 1245927 | 4 | 25 | 57 | 82 | 86 | 0.3 |
| 1245960 | 14 | 34 | 54 | 78 | 88 | 0.2 |
| 1245986 | 2 | 2 | 30 | 78 | 95 | 0.4 |
| 1245987 | 26 | 32 | 58 | 82 | 91 | 0.2 |
| 1246013 | 0 | 0 | 27 | 68 | 83 | 0.8 |
| 1246064 | 19 | 36 | 63 | 74 | 92 | 0.2 |
| 1246116 | 17 | 41 | 75 | 92 | 95 | 0.1 |
| 1246169 | 0 | 0 | 30 | 55 | 86 | 1.0 |
| 1246195 | 0 | 0 | 26 | 63 | 82 | 0.9 |
| 1246610 | 5 | 0 | 2 | 57 | 82 | 1.3 |
| 1247078 | 3 | 4 | 28 | 66 | 93 | 0.6 |

TABLE 58
Multi-dose assay of modified oligonucleotides in HepaRG cells

| | % inhibition HSD17B13 | | | | | |
|---|---|---|---|---|---|---|
| ION | | | | | | IC₅₀ |
| No. | 20 nM | 78 nM | 313 nM | 1250 nM | 5000 nM | (μM) |
| 1245105 | 0 | 0 | 24 | 61 | 88 | 0.8 |
| 1245651 | 3 | 22 | 49 | 78 | 89 | 0.3 |
| 1245676 | 0 | 0 | 34 | 67 | 91 | 0.7 |
| 1245806 | 28 | 27 | 51 | 69 | 91 | 0.2 |
| 1245807 | 1 | 9 | 47 | 80 | 90 | 0.4 |
| 1245858 | 16 | 39 | 66 | 86 | 96 | 0.2 |
| 1245927 | 0 | 22 | 46 | 79 | 89 | 0.4 |
| 1245988 | 8 | 26 | 40 | 65 | 85 | 0.5 |
| 1246066 | 26 | 41 | 63 | 86 | 94 | 0.1 |
| 1246067 | 0 | 0 | 40 | 51 | 85 | 0.9 |
| 1246093 | 0 | 0 | 24 | 64 | 86 | 0.7 |
| 1246144 | 5 | 30 | 43 | 78 | 86 | 0.3 |
| 1246145 | 0 | 3 | 40 | 72 | 85 | 0.6 |
| 1246248 | 28 | 32 | 62 | 86 | 92 | 0.1 |
| 1247029 | 0 | 0 | 11 | 36 | 73 | 1.9 |

TABLE 59
Multi-dose assay of modified oligonucleotides in HepaRG cells

| | % inhibition HSD17B13 | | | | | |
|---|---|---|---|---|---|---|
| ION | | | | | | IC₅₀ |
| No. | 20 nM | 78 nM | 313 nM | 1250 nM | 5000 nM | (μM) |
| 1245080 | 7 | 13 | 39 | 70 | 87 | 0.5 |
| 1245081 | 4 | 28 | 44 | 72 | 85 | 0.4 |
| 1245106 | 0 | 28 | 46 | 80 | 81 | 0.4 |
| 1245809 | 0 | 0 | 1 | 48 | 77 | 1.6 |
| 1245886 | 0 | 4 | 21 | 62 | 80 | 0.9 |
| 1245927 | 16 | 29 | 64 | 84 | 90 | 0.2 |
| 1245964 | 16 | 22 | 48 | 72 | 95 | 0.3 |
| 1245990 | 15 | 4 | 29 | 61 | 86 | 0.7 |
| 1245991 | 0 | 9 | 26 | 63 | 83 | 0.8 |
| 1246068 | 14 | 31 | 49 | 73 | 92 | 0.3 |
| 1246095 | 10 | 16 | 46 | 69 | 88 | 0.4 |
| 1246121 | 0 | 18 | 37 | 76 | 86 | 0.5 |
| 1246173 | 3 | 26 | 58 | 83 | 89 | 0.3 |
| 1246562 | 5 | 19 | 26 | 70 | 88 | 0.5 |

TABLE 60
Multi-dose assay of modified oligonucleotides in HepaRG cells

| | % inhibition HSD17B13 | | | | | |
|---|---|---|---|---|---|---|
| ION | | | | | | IC₅₀ |
| No. | 20 nM | 78 nM | 313 nM | 1250 nM | 5000 nM | (μM) |
| 1245212 | 3 | 1 | 43 | 63 | 88 | 0.6 |
| 1245680 | 0 | 0 | 22 | 64 | 82 | 0.9 |
| 1245681 | 0 | 17 | 58 | 80 | 94 | 0.3 |
| 1245888 | 17 | 22 | 41 | 72 | 87 | 0.4 |
| 1245927 | 0 | 16 | 52 | 78 | 93 | 0.4 |
| 1245967 | 0 | 9 | 41 | 62 | 89 | 0.6 |
| 1246019 | 17 | 26 | 62 | 92 | 91 | 0.2 |
| 1246070 | 7 | 31 | 46 | 74 | 94 | 0.3 |
| 1246123 | 0 | 16 | 37 | 58 | 83 | 0.7 |
| 1246226 | 12 | 30 | 56 | 86 | 89 | 0.2 |
| 1246227 | 0 | 6 | 0 | 55 | 78 | 1.4 |
| 1246824 | 0 | 0 | 17 | 40 | 81 | 1.5 |
| 1246902 | 0 | 17 | 40 | 74 | 86 | 0.5 |
| 1246903 | 35 | 35 | 60 | 68 | 84 | 0.2 |
| 1246929 | 0 | 18 | 40 | 65 | 87 | 0.6 |

TABLE 61
Multi-dose assay of modified oligonucleotides in HepaRG cells

| | % inhibition HSD17B13 | | | | | |
|---|---|---|---|---|---|---|
| ION | | | | | | IC₅₀ |
| No. | 20 nM | 78 nM | 313 nM | 1250 nM | 5000 nM | (μM) |
| 1245085 | 18 | 21 | 49 | 79 | 95 | 0.3 |
| 1245162 | 19 | 5 | 41 | 78 | 97 | 0.4 |
| 1245579 | 0 | 8 | 39 | 65 | 87 | 0.6 |
| 1245656 | 20 | 33 | 47 | 80 | 83 | 0.3 |
| 1245682 | 23 | 42 | 53 | 87 | 93 | 0.2 |
| 1245838 | 9 | 0 | 28 | 77 | 92 | 0.5 |
| 1245916 | 1 | 25 | 26 | 60 | 82 | 0.7 |
| 1245927 | 14 | 36 | 76 | 77 | 86 | 0.2 |
| 1245968 | 24 | 43 | 69 | 88 | 88 | 0.1 |
| 1245969 | 0 | 9 | 32 | 67 | 74 | 0.9 |
| 1246124 | 7 | 12 | 31 | 76 | 90 | 0.5 |
| 1246203 | 0 | 0 | 21 | 58 | 87 | 1.0 |
| 1246489 | 2 | 14 | 44 | 86 | 86 | 0.4 |
| 1246853 | 0 | 0 | 16 | 52 | 77 | 1.3 |
| 1247061 | 0 | 12 | 32 | 70 | 93 | 0.5 |

TABLE 62
Multi-dose assay of modified oligonucleotides in HepaRG cells

| | % inhibition HSD17B13 | | | | | |
|---|---|---|---|---|---|---|
| ION | | | | | | IC₅₀ |
| No. | 20 nM | 78 nM | 313 nM | 1250 nM | 5000 nM | (μM) |
| 1245580 | 3 | 9 | 49 | 58 | 89 | 0.5 |
| 1245607 | 0 | 16 | 33 | 77 | 87 | 0.5 |
| 1245684 | 35 | 51 | 77 | 92 | 96 | 0.1 |
| 1245685 | 13 | 25 | 59 | 80 | 93 | 0.2 |
| 1245736 | 0 | 0 | 45 | 81 | 95 | 0.6 |
| 1245737 | 13 | 23 | 53 | 83 | 94 | 0.3 |
| 1245919 | 0 | 0 | 0 | 72 | 90 | 1.0 |
| 1245927 | 0 | 9 | 37 | 84 | 77 | 0.4 |
| 1245996 | 29 | 53 | 74 | 91 | 97 | 0.1 |
| 1245997 | 16 | 31 | 54 | 79 | 90 | 0.2 |
| 1246022 | 49 | 54 | 80 | 93 | 94 | 0.0 |
| 1246023 | 0 | 40 | 89 | 86 | 95 | 0.2 |
| 1246048 | 12 | 0 | 73 | 73 | 97 | 0.3 |
| 1246074 | 7 | 43 | 73 | 84 | 94 | 0.2 |
| 1246075 | 0 | 0 | 41 | 70 | 88 | 0.7 |

TABLE 63
Multi-dose assay of modified oligonucleotides in HepaRG cells

| | % inhibition HSD17B13 | | | | | |
|---|---|---|---|---|---|---|
| ION | | | | | | IC₅₀ |
| No. | 20 nM | 78 nM | 313 nM | 1250 nM | 5000 nM | (μM) |
| 1245141 | 12 | 30 | 57 | 84 | 90 | 0.2 |
| 1245374 | 29 | 7 | 43 | 65 | 85 | 0.4 |
| 1245660 | 7 | 12 | 36 | 73 | 94 | 0.4 |
| 1245738 | 36 | 38 | 61 | 80 | 88 | 0.1 |
| 1245790 | 50 | 61 | 68 | 87 | 95 | <0.2 |
| 1245927 | 0 | 23 | 58 | 85 | 90 | 0.3 |
| 1245972 | 24 | 39 | 58 | 79 | 90 | 0.2 |
| 1245973 | 0 | 26 | 41 | 66 | 75 | 0.5 |
| 1245998 | 12 | 10 | 43 | 78 | 89 | 0.4 |
| 1245999 | 0 | 19 | 60 | 87 | 88 | 0.3 |
| 1246025 | 35 | 54 | 84 | 94 | 89 | 0.0 |
| 1246051 | 4 | 26 | 54 | 78 | 92 | 0.3 |
| 1246128 | 37 | 38 | 58 | 84 | 92 | 0.1 |
| 1246701 | 0 | 4 | 12 | 20 | 40 | 5.0 |
| 1246909 | 0 | 17 | 27 | 66 | 86 | 0.7 |

TABLE 64
Multi-dose assay of modified oligonucleotides in HepaRG cells

| | % inhibition HSD17B13 | | | | | |
|---|---|---|---|---|---|---|
| ION | | | | | | IC₅₀ |
| No. | 20 nM | 78 nM | 313 nM | 1250 nM | 5000 nM | (μM) |
| 1245142 | 0 | 9 | 40 | 64 | 78 | 0.8 |
| 1245246 | 15 | 32 | 33 | 74 | 91 | 0.3 |
| 1245610 | 28 | 44 | 61 | 82 | 97 | 0.1 |
| 1245715 | 0 | 0 | 37 | 65 | 86 | 0.9 |
| 1245844 | 38 | 37 | 53 | 75 | 89 | 0.1 |
| 1245927 | 11 | 27 | 64 | 75 | 81 | 0.3 |
| 1245975 | 0 | 11 | 48 | 71 | 82 | 0.5 |
| 1246027 | 0 | 2 | 15 | 71 | 85 | 0.8 |
| 1246052 | 36 | 41 | 57 | 79 | 85 | 0.1 |
| 1246053 | 0 | 0 | 9 | 56 | 74 | 1.5 |
| 1246104 | 21 | 40 | 64 | 77 | 91 | 0.2 |
| 1246105 | 0 | 0 | 3 | 47 | 73 | 1.8 |
| 1246130 | 35 | 13 | 54 | 78 | 91 | 0.2 |
| 1246157 | 44 | 37 | 62 | 78 | 91 | 0.1 |
| 1246391 | 0 | 0 | 2 | 48 | 83 | 1.5 |

TABLE 65
Multi-dose assay of modified oligonucleotides in HepaRG cells

| | % inhibition HSD17B13 | | | | | |
|---|---|---|---|---|---|---|
| ION | | | | | | IC₅₀ |
| No. | 20 nM | 78 nM | 313 nM | 1250 nM | 5000 nM | (μM) |
| 1245092 | 9 | 20 | 39 | 68 | 89 | 0.4 |
| 1245639 | 0 | 0 | 21 | 65 | 85 | 0.8 |
| 1245716 | 20 | 27 | 40 | 69 | 86 | 0.4 |
| 1245927 | 0 | 0 | 25 | 74 | 64 | 1.2 |
| 1245976 | 9 | 29 | 57 | 77 | 86 | 0.3 |
| 1245977 | 0 | 21 | 44 | 76 | 94 | 0.4 |
| 1246002 | 38 | 51 | 64 | 79 | 91 | 0.1 |
| 1246028 | 0 | 0 | 19 | 56 | 80 | 1.2 |
| 1246029 | 0 | 18 | 50 | 73 | 86 | 0.4 |
| 1246081 | 5 | 19 | 48 | 75 | 88 | 0.4 |
| 1246185 | 13 | 15 | 43 | 62 | 79 | 0.6 |
| 1246314 | 3 | 8 | 36 | 72 | 92 | 0.5 |
| 1246340 | 28 | 32 | 37 | 58 | 85 | 0.4 |
| 1246705 | 1 | 14 | 20 | 42 | 70 | 1.8 |
| 1246861 | 0 | 0 | 7 | 25 | 63 | 5.0 |

TABLE 66
Multi-dose assay of modified oligonucleotides in HepaRG cells

| | % inhibition HSD17B13 | | | | | |
|---|---|---|---|---|---|---|
| ION | | | | | | IC₅₀ |
| No. | 20 nM | 78 nM | 313 nM | 1250 nM | 5000 nM | (μM) |
| 1246023 | 9 | 21 | 57 | 83 | 87 | 0.3 |
| 1340071 | 0 | 0 | 0 | 56 | 88 | 1.3 |
| 1340085 | 0 | 0 | 27 | 68 | 91 | 0.8 |
| 1340154 | 0 | 20 | 48 | 80 | 90 | 0.4 |
| 1340360 | 0 | 0 | 0 | 51 | 42 | 3.8 |
| 1340385 | 4 | 35 | 69 | 82 | 72 | 0.3 |
| 1340448 | 0 | 0 | 27 | 78 | 74 | 0.9 |
| 1340543 | 5 | 15 | 62 | 78 | 86 | 0.3 |
| 1340546 | 0 | 12 | 40 | 65 | 56 | 1.2 |
| 1340549 | 0 | 4 | 50 | 78 | 92 | 0.4 |
| 1340601 | 0 | 0 | 31 | 54 | 81 | 1.1 |
| 1340684 | 0 | 0 | 31 | 58 | 84 | 0.9 |
| 1340704 | 0 | 8 | 25 | 69 | 83 | 0.8 |
| 1340762 | 0 | 13 | 41 | 71 | 79 | 0.7 |
| 1340878 | 1 | 1 | 30 | 79 | 85 | 0.6 |

TABLE 67
Multi-dose assay of modified oligonucleotides in HepaRG cells

| | % inhibition HSD17B13 | | | | | |
|---|---|---|---|---|---|---|
| ION | | | | | | IC₅₀ |
| No. | 20 nM | 78 nM | 313 nM | 1250 nM | 5000 nM | (μM) |
| 1246023 | 0 | 20 | 55 | 82 | 88 | 0.4 |
| 1340206 | 0 | 22 | 55 | 71 | 90 | 0.4 |
| 1340208 | 12 | 12 | 51 | 69 | 92 | 0.4 |
| 1340226 | 0 | 0 | 43 | 73 | 96 | 0.6 |
| 1340260 | 0 | 0 | 33 | 56 | 78 | 1.0 |
| 1340268 | 0 | 0 | 35 | 55 | 90 | 0.9 |
| 1340334 | 0 | 5 | 30 | 67 | 86 | 0.8 |
| 1340397 | 0 | 0 | 49 | 73 | 88 | 0.7 |
| 1340555 | 1 | 13 | 41 | 63 | 76 | 0.7 |
| 1340585 | 0 | 13 | 47 | 77 | 74 | 0.6 |
| 1340603 | 18 | 16 | 47 | 69 | 85 | 0.4 |
| 1340647 | 14 | 35 | 76 | 83 | 94 | 0.2 |
| 1340789 | 10 | 14 | 32 | 73 | 83 | 0.5 |
| 1340834 | 14 | 18 | 48 | 74 | 79 | 0.4 |
| 1340895 | 0 | 19 | 32 | 65 | 87 | 0.6 |

TABLE 68
Multi-dose assay of modified oligonucleotides in HepaRG cells

| | % inhibition HSD17B13 | | | | | |
|---|---|---|---|---|---|---|
| ION | | | | | | IC₅₀ |
| No. | 20 nM | 78 nM | 313 nM | 1250 nM | 5000 nM | (μM) |
| 1246023 | 0 | 25 | 47 | 76 | 85 | 0.4 |
| 1340168 | 6 | 0 | 32 | 80 | 90 | 0.6 |
| 1340401 | 4 | 11 | 50 | 78 | 79 | 0.4 |
| 1340449 | 26 | 8 | 59 | 81 | 93 | 0.3 |
| 1340548 | 0 | 17 | 51 | 78 | 92 | 0.4 |
| 1340626 | 0 | 5 | 45 | 80 | 90 | 0.5 |
| 1340646 | 6 | 31 | 57 | 67 | 58 | 0.6 |
| 1340653 | 2 | 0 | 38 | 69 | 77 | 0.8 |
| 1340780 | 6 | 23 | 36 | 73 | 83 | 0.5 |
| 1340820 | 20 | 35 | 55 | 84 | 88 | 0.2 |
| 1340821 | 0 | 0 | 21 | 40 | 60 | 2.7 |
| 1340847 | 9 | 20 | 45 | 60 | 88 | 0.5 |
| 1340857 | 0 | 0 | 11 | 46 | 66 | 2.3 |
| 1340859 | 14 | 32 | 47 | 71 | 84 | 0.3 |
| 1340908 | 16 | 33 | 60 | 84 | 92 | 0.2 |

TABLE 69
Multi-dose assay of modified oligonucleotides in HepaRG cells

| | % inhibition HSD17B13 | | | | | |
|---|---|---|---|---|---|---|
| ION | | | | | | IC₅₀ |
| No. | 20 nM | 78 nM | 313 nM | 1250 nM | 5000 nM | (μM) |
| 1246023 | 0 | 16 | 42 | 80 | 87 | 0.5 |
| 1340153 | 0 | 18 | 38 | 75 | 82 | 0.5 |
| 1340227 | 0 | 21 | 57 | 70 | 90 | 0.4 |
| 1340435 | 14 | 27 | 57 | 78 | 90 | 0.3 |
| 1340441 | 6 | 14 | 32 | 70 | 74 | 0.7 |
| 1340493 | 13 | 23 | 54 | 70 | 88 | 0.3 |
| 1340510 | 11 | 13 | 27 | 66 | 87 | 0.6 |
| 1340511 | 0 | 0 | 7 | 52 | 74 | 1.6 |
| 1340572 | 19 | 23 | 53 | 75 | 89 | 0.3 |
| 1340630 | 20 | 25 | 42 | 75 | 87 | 0.3 |
| 1340670 | 16 | 24 | 51 | 74 | 93 | 0.3 |
| 1340782 | 0 | 26 | 54 | 77 | 92 | 0.3 |
| 1340840 | 0 | 3 | 23 | 43 | 67 | 1.9 |
| 1340848 | 0 | 0 | 30 | 71 | 91 | 0.7 |
| 1340861 | 22 | 34 | 47 | 74 | 90 | 0.2 |

TABLE 70
Multi-dose assay of modified oligonucleotides in HepaRG cells

| | % inhibition HSD17B13 | | | | | |
|---|---|---|---|---|---|---|
| ION | | | | | | IC₅₀ |
| No. | 20 nM | 78 nM | 313 nM | 1250 nM | 5000 nM | (μM) |
| 1246023 | 3 | 22 | 55 | 79 | 84 | 0.3 |
| 1340159 | 10 | 13 | 49 | 83 | 80 | 0.4 |
| 1340481 | 0 | 0 | 34 | 64 | 82 | 0.8 |
| 1340502 | 0 | 4 | 37 | 71 | 87 | 0.6 |
| 1340564 | 5 | 10 | 34 | 72 | 85 | 0.5 |
| 1340635 | 7 | 21 | 40 | 79 | 82 | 0.4 |
| 1340649 | 0 | 0 | 42 | 69 | 89 | 0.6 |
| 1340672 | 0 | 20 | 47 | 72 | 76 | 0.6 |
| 1340743 | 12 | 18 | 46 | 80 | 90 | 0.3 |
| 1340779 | 5 | 7 | 39 | 68 | 40 | 0.6 |
| 1340793 | 3 | 24 | 66 | 86 | 91 | 0.2 |
| 1340796 | 0 | 19 | 61 | 88 | 84 | 0.3 |
| 1340799 | 16 | 34 | 72 | 86 | 89 | 0.2 |
| 1340827 | 16 | 31 | 48 | 72 | 81 | 0.3 |
| 1340881 | 10 | 28 | 52 | 59 | 79 | 0.4 |

TABLE 71
Multi-dose assay of modified oligonucleotides in HepaRG cells

| | % inhibition HSD17B13 | | | | | |
|---|---|---|---|---|---|---|
| ION | | | | | | IC₅₀ |
| No. | 20 nM | 78 nM | 313 nM | 1250 nM | 5000 nM | (μM) |
| 1246023 | 0 | 20 | 42 | 58 | 79 | 0.7 |
| 1341183 | 11 | 18 | 27 | 53 | 57 | 2.0 |
| 1341190 | 0 | 3 | 29 | 53 | 48 | 2.4 |
| 1341193 | 11 | 27 | 53 | 63 | 68 | 0.5 |
| 1341195 | 15 | 13 | 12 | 61 | 71 | 1.2 |
| 1341239 | 16 | 0 | 27 | 62 | 83 | 0.7 |
| 1341262 | 0 | 4 | 36 | 52 | 78 | 0.9 |
| 1341273 | 6 | 18 | 38 | 63 | 81 | 0.6 |
| 1341303 | 29 | 21 | 44 | 61 | 90 | 0.3 |
| 1341313 | 9 | 33 | 58 | 67 | 85 | 0.3 |
| 1341315 | 8 | 28 | 52 | 79 | 82 | 0.3 |
| 1341342 | 24 | 25 | 37 | 51 | 81 | 0.6 |
| 1341348 | 15 | 25 | 43 | 71 | 70 | 0.5 |
| 1341391 | 0 | 2 | 35 | 49 | 70 | 1.3 |
| 1341547 | 13 | 2 | 40 | 61 | 83 | 0.6 |

TABLE 72
Multi-dose assay of modified oligonucleotides in HepaRG cells

| | % inhibition HSD17B13 | | | | | |
|---|---|---|---|---|---|---|
| ION | | | | | | IC₅₀ |
| No. | 20 nM | 78 nM | 313 nM | 1250 nM | 5000 nM | (μM) |
| 1246023 | 19 | 1 | 38 | 77 | 89 | 0.4 |
| 1341026 | 10 | 20 | 43 | 73 | 83 | 0.4 |
| 1341032 | 0 | 13 | 14 | 74 | 92 | 0.6 |
| 1341035 | 5 | 0 | 36 | 62 | 74 | 1.0 |
| 1341036 | 23 | 28 | 53 | 78 | 93 | 0.2 |
| 1341038 | 17 | 25 | 57 | 76 | 85 | 0.3 |
| 1341052 | 6 | 13 | 52 | 69 | 79 | 0.5 |
| 1341062 | 0 | 23 | 47 | 66 | 79 | 0.5 |
| 1341095 | 0 | 17 | 51 | 61 | 81 | 0.6 |
| 1341108 | 28 | 34 | 58 | 81 | 83 | 0.2 |
| 1341146 | 6 | 0 | 39 | 66 | 70 | 0.9 |
| 1341206 | 28 | 25 | 45 | 81 | 87 | 0.2 |
| 1341260 | 23 | 24 | 37 | 66 | 78 | 0.5 |
| 1341283 | 8 | 23 | 40 | 67 | 90 | 0.4 |
| 1341308 | 18 | 29 | 54 | 71 | 86 | 0.3 |

TABLE 73
Multi-dose assay of modified oligonucleotides in HepaRG cells

| | % inhibition HSD17B13 | | | | | |
|---|---|---|---|---|---|---|
| ION | | | | | | IC₅₀ |
| No. | 20 nM | 78 nM | 313 nM | 1250 nM | 5000 nM | (μM) |
| 1246023 | 0 | 0 | 47 | 66 | 89 | 0.6 |
| 1340983 | 0 | 0 | 26 | 55 | 45 | 3.1 |
| 1340995 | 1 | 17 | 37 | 66 | 62 | 0.9 |
| 1341011 | 0 | 0 | 34 | 50 | 81 | 1.0 |
| 1341043 | 0 | 3 | 40 | 50 | 44 | 2.2 |
| 1341050 | 0 | 7 | 39 | 55 | 76 | 0.9 |
| 1341057 | 6 | 9 | 39 | 57 | 78 | 0.8 |
| 1341068 | 0 | 0 | 11 | 46 | 79 | 1.5 |
| 1341075 | 0 | 0 | 0 | 39 | 55 | 3.1 |
| 1341118 | 0 | 8 | 13 | 31 | 74 | 2.2 |
| 1341145 | 0 | 17 | 37 | 69 | 83 | 0.6 |
| 1341154 | 0 | 0 | 47 | 43 | 79 | 1.0 |
| 1341244 | 10 | 0 | 21 | 55 | 68 | 1.5 |
| 1341335 | 0 | 0 | 25 | 51 | 55 | 2.4 |
| 1341510 | 4 | 17 | 34 | 57 | 66 | 1.0 |

TABLE 74
Multi-dose assay of modified oligonucleotides in HepaRG cells

| | % inhibition HSD17B13 | | | | | |
|---|---|---|---|---|---|---|
| ION | | | | | | IC₅₀ |
| No. | 20 nM | 78 nM | 313 nM | 1250 nM | 5000 nM | (μM) |
| 1246023 | 1 | 20 | 59 | 67 | 88 | 0.4 |
| 1340992 | 0 | 0 | 0 | 51 | 76 | 1.8 |
| 1341004 | 0 | 12 | 31 | 55 | 77 | 0.9 |
| 1341022 | 15 | 18 | 25 | 65 | 84 | 0.6 |
| 1341048 | 1 | 15 | 43 | 74 | 85 | 0.5 |
| 1341077 | 8 | 16 | 38 | 54 | 71 | 0.9 |
| 1341104 | 0 | 23 | 38 | 64 | 79 | 0.6 |
| 1341140 | 12 | 17 | 41 | 64 | 82 | 0.5 |
| 1341151 | 13 | 31 | 52 | 71 | 80 | 0.3 |
| 1341271 | 8 | 0 | 43 | 65 | 80 | 0.7 |
| 1341318 | 23 | 17 | 49 | 61 | 55 | 1.0 |
| 1341436 | 0 | 23 | 46 | 64 | 77 | 0.6 |
| 1341437 | 3 | 0 | 16 | 60 | 88 | 0.9 |
| 1341654 | 0 | 24 | 53 | 66 | 69 | 0.6 |
| 1341668 | 7 | 25 | 42 | 56 | 82 | 0.6 |

TABLE 75
Multi-dose assay of modified oligonucleotides in HepaRG cells

| | % inhibition HSD17B13 | | | | | |
|---|---|---|---|---|---|---|
| ION | | | | | | IC₅₀ |
| No. | 20 nM | 78 nM | 313 nM | 1250 nM | 5000 nM | (μM) |
| 1246023 | 2 | 24 | 40 | 70 | 92 | 0.4 |
| 1341651 | 19 | 35 | 41 | 67 | 85 | 0.3 |
| 1341655 | 0 | 0 | 13 | 70 | 89 | 0.9 |
| 1341671 | 13 | 27 | 35 | 66 | 91 | 0.4 |
| 1341675 | 9 | 22 | 46 | 77 | 76 | 0.4 |
| 1341686 | 2 | 2 | 31 | 61 | 78 | 0.9 |
| 1341703 | 16 | 14 | 33 | 52 | 58 | 1.8 |
| 1341735 | 12 | 32 | 54 | 71 | 84 | 0.3 |
| 1341742 | 13 | 26 | 39 | 66 | 84 | 0.4 |
| 1341797 | 0 | 0 | 34 | 65 | 91 | 0.6 |
| 1341815 | 0 | 21 | 20 | 65 | 75 | 0.9 |
| 1341839 | 25 | 16 | 39 | 60 | 87 | 0.5 |
| 1341899 | 14 | 28 | 42 | 66 | 77 | 0.5 |
| 1341911 | 7 | 29 | 46 | 67 | 90 | 0.4 |
| 1341913 | 0 | 2 | 0 | 48 | 59 | 3.2 |

TABLE 76
Multi-dose assay of modified oligonucleotides in HepaRG cells

| | % inhibition HSD17B13 | | | | | |
|---|---|---|---|---|---|---|
| ION | | | | | | IC₅₀ |
| No. | 20 nM | 78 nM | 313 nM | 1250 nM | 5000 nM | (μM) |
| 1246023 | 0 | 7 | 18 | 81 | 92 | 0.6 |
| 1341531 | 18 | 21 | 38 | 62 | 76 | 0.6 |
| 1341561 | 26 | 22 | 39 | 75 | 70 | 0.4 |
| 1341644 | 0 | 11 | 60 | 82 | 90 | 0.4 |
| 1341645 | 0 | 20 | 0 | 39 | 79 | 1.8 |
| 1341646 | 3 | 0 | 8 | 57 | 76 | 1.3 |
| 1341968 | 0 | 0 | 10 | 72 | 90 | 0.8 |
| 1341980 | 8 | 9 | 26 | 54 | 78 | 1.0 |

### Example 6: Design of Human HSD17B13 Modified Oligonucleotides

[0529] Certain modified oligonucleotides described above were further modified by conjugating at the 5′-end with a LICA-1 moiety. The resulting compounds and their unconjugated counterparts are listed in the table below. The compounds have identical sequence and oligonucleotide chemistry as the “parent compounds” described above.

TABLE 77
Design of 5′-LICA-1-conjugated modified
oligonucleotides targeting human HSD17B13

| GalNac | | | |
|---|---|---|---|
| Conjugated | Parent | | SEQ |
| Compound | Compound | Sequence | ID |
| No. | No. | (5′ to 3′) | NO |
| 1310535 | 1246163 | CAACTATGTAATAGGC | 286 |
| 1371966 | 1245806 | AAAATAGAGTCGGTCA | 817 |
| 1371968 | 1246068 | AGCATAAGTTACCAGA | 983 |
| 1371969 | 1246115 | AAATTATACTTTTCCG | 596 |
| 1371971 | 1246063 | GTTTTATAACTGAGCT | 594 |
| 1371973 | 1246019 | GAATTTTTGAGGTTGG | 1215 |
| 1371974 | 1245987 | TCTCAAGGAGTACTTC | 747 |
| 1371976 | 1245952 | GTCATAAAAATCGCTG | 43 |
| 1371978 | 1245930 | AAGATAAGTAGATGGT | 355 |
| 1371979 | 1245972 | GCACTAAAGGTTTCTG | 1602 |
| 1371981 | 1245980 | ATACTAATGTCCAAGG | 201 |
| 1373086 | 1245649 | CTACTTGAACAGTCTT | 734 |
| 1373087 | 1246903 | AGTTAGTATAGTTATC | 1249 |
| 1373089 | 1246134 | CTCATTTATGTACCAA | 51 |
| 1373090 | 1246162 | ACTATGTAATAGGCAG | 208 |
| 1373097 | 1245984 | ACAATTTTTCCAATCC | 513 |
| 1373098 | 1246022 | AGTGAATCATTCAGTA | 1449 |
| 1373099 | 1245996 | CATTCGAATTTCTTCA | 1448 |
| 1373101 | 1245790 | GTATCTTATAAGACTA | 1595 |
| 1394140 | 1341675 | CTACUTGAACAGTCTT | 2868 |
| 1394141 | 1340820 | GTAGATGGTAAGTCAA | 2567 |
| 1394142 | 1341283 | TGATATTCTGTGGCAT | 1124 |
| 1394143 | 1341313 | TATGTAATAGCCAGTA | 508 |
| 1394144 | 1341742 | GTATCTTATAAGACTA | 1595 |
| 1394145 | 1341038 | TTCTTATGTAATAGCC | 819 |
| 1394146 | 1341735 | CACCGTTTTGGGCTAA | 1516 |
| 1394147 | 1341032 | TTATGTAATAGCCAGT | 586 |
| 1394148 | 1341108 | GCATCTTAAGATACCC | 553 |
| 1394149 | 1340435 | TAGAACTGTGTTGCTT | 2535 |
| 1394150 | 1340908 | TAGAGTGAATCATTCA | 2420 |
| 1394151 | 1340208 | GAGTAGTGTAAGCTGA | 2204 |
| 1394152 | 1340782 | GAGATTTGAAGGTTAG | 2561 |
| 1371970 | 1246157 | GCAGTAAAGTGCTAAG | 1843 |
| 1371972 | 1246025 | AGCCTTAGAGTGAATC | 1682 |
| 1373094 | 1246036 | TGAAAACTCAGCCAGC | 515 |
| 1373096 | 1245968 | GTAATTTTCAGATCCC | 1291 |
| 1373100 | 1245682 | GTTGATATTCTGTGGC | 1280 |

### Example 7: Dose-Dependent Ex-Vivo Inhibition of Human HSD17B13 in Transgenic Mouse Hepatocytes

[0530] The conjugated modified oligonucleotides described above were tested for inhibition of HSD17B13 RNA at various doses in primary mouse hepatocytes extracted from transgenic mice.

[0531] A transgenic mouse model was developed in-house using a Fosmid containing the human HSD17B13 gene (NCBI Clone DB ID: ABC8-43206400A10). The clone was digested at Not1 restriction sites (2 different sites) to produce a fragment containing 19,118 bp of the human HSD17B13 gene, including 12,175 bp upstream and 7,553 bp downstream regions. That gene fragment was introduced into fertilized eggs from C57/BL/6NTac strain mice by pronuclear injection to produce huHSD 17469 and 17470 founder lines. Transgenic mice derived from Founder Line 17469 was used in the experiments described herein. Human HSD17B13 RNA expression is found in the liver in this model. Mice were sacrified and hepatocytes were collected for use in experiments testing conjugated modified oligonucleotides.

[0532] The conjugated modified oligonucleotides were tested in a series of experiments using the same culture conditions. The results for each experiment are presented in separate tables shown below. Primary mouse transgenic hepatocytes described above were plated at a density of 20,000 cells per well and were treated by free uptake with conjugated modified oligonucleotides diluted to different concentrations as specified in the tables below. After an overnight incubation, HSD17B13 RNA levels were measured as previously described herein using the Human HSD17B13 primer-probe set RTS43553. HSD17B13 RNA levels were normalized to total GAPDH content. Results are presented in the tables below as percent inhibition of HSD17B13, relative to untreated control cells. The half maximal inhibitory concentration (IC₅₀) of each modified oligonucleotide was calculated using a linear regression on a log/linear plot of the data in excel and is also presented in the Tables below.

TABLE 78
Multi-dose assay of modified oligonucleotides
in primary mouse hepatocytes

| | % Inhibition | | | | | | |
|---|---|---|---|---|---|---|---|
| ION | 1.95 | 7.81 | 31.25 | 125 | 500 | 2000 | IC₅₀ |
| No. | nM | nM | nM | nM | nM | nM | (nM) |
| 1310535 | 38 | 53 | 80 | 87 | 85 | 90 | 3.2 |
| 1371966 | 41 | 52 | 87 | 88 | 91 | 89 | 4.1 |
| 1371968 | 39 | 56 | 84 | 94 | 91 | 90 | 4.1 |
| 1371969 | 23 | 60 | 81 | 88 | 88 | 92 | 5.2 |
| 1371971 | 6 | 45 | 54 | 70 | 85 | 76 | 34.1 |
| 1371973 | 38 | 61 | 84 | 93 | 94 | 96 | 2.2 |
| 1371974 | 4 | 31 | 65 | 74 | 74 | 82 | 38.6 |
| 1371976 | 16 | 62 | 79 | 87 | 90 | 93 | 7.3 |
| 1371978 | 0 | 39 | 84 | 92 | 89 | 88 | 18.4 |
| 1371979 | 10 | 38 | 70 | 82 | 85 | 87 | 21.0 |
| 1371981 | 33 | 68 | 86 | 94 | 93 | 95 | 1.9 |

TABLE 79
Multi-dose assay of modified oligonucleotides
in primary mouse hepatocytes

| | % Inhibition | | | | | | |
|---|---|---|---|---|---|---|---|
| ION | 1.95 | 7.81 | 31.25 | 125 | 500 | 2000 | IC₅₀ |
| No. | nM | nM | nM | nM | nM | nM | (nM) |
| 1373086 | 24 | 49 | 78 | 83 | 86 | 84 | 8.9 |
| 1373087 | 23 | 20 | 67 | 70 | 64 | 65 | 22.6 |
| 1373089 | 36 | 62 | 84 | 92 | 91 | 92 | 4.0 |
| 1373090 | 43 | 49 | 69 | 81 | 80 | 82 | 5.4 |
| 1373097 | 41 | 64 | 84 | 89 | 92 | 91 | 1.3 |
| 1373098 | 43 | 69 | 80 | 87 | 89 | 89 | 2.3 |
| 1373099 | 19 | 37 | 68 | 84 | 83 | 86 | 13.8 |
| 1373101 | 9 | 41 | 66 | 83 | 85 | 92 | 20.5 |
| 1394140 | 5 | 42 | 80 | 78 | 85 | 88 | 19.6 |
| 1394142 | 5 | 49 | 73 | 87 | 89 | 91 | 16.4 |
| 1371966 | 4 | 55 | 77 | 88 | 88 | 87 | 11.5 |

TABLE 80
Multi-dose assay of modified oligonucleotides
in primary mouse hepatocytes

| | % Inhibition | | | | | | |
|---|---|---|---|---|---|---|---|
| ION | 1.95 | 7.81 | 31.25 | 125 | 500 | 2000 | IC₅₀ |
| No. | nM | nM | nM | nM | nM | nM | (nM) |
| 1394143 | 19 | 45 | 80 | 83 | 89 | 89 | 10.6 |
| 1394144 | 16 | 21 | 54 | 70 | 75 | 80 | 48.1 |
| 1394145 | 37 | 44 | 83 | 91 | 88 | 88 | 6.2 |
| 1394146 | 3 | 30 | 67 | 74 | 82 | 77 | 38.2 |
| 1394147 | 30 | 71 | 85 | 94 | 94 | 93 | 4.0 |
| 1394148 | 41 | 80 | 88 | 90 | 87 | 91 | 1.7 |
| 1394149 | 1 | 26 | 56 | 72 | 78 | 82 | 50.9 |
| 1394150 | 14 | 45 | 80 | 84 | 88 | 85 | 12.8 |
| 1394151 | 0 | 37 | 63 | 81 | 83 | 85 | 42.5 |
| 1394152 | 8 | 35 | 63 | 82 | 81 | 87 | 28.1 |
| 1371966 | 0 | 61 | 72 | 82 | 89 | 88 | 16.7 |

### Example 8: Tolerability of Modified Oligonucleotides Complementary to Human HSD17B13 in CD-1 Mice

[0533] CD-1 mice are a multipurpose mouse model frequently utilized for safety and efficacy testing. In this study, CD-1 mice were treated with conjugated modified oligonucleotides selected from studies described above and evaluated for changes in the levels of various plasma chemistry markers.

### Treatment

[0534] Groups of 6- to 8-week-old male CD-1 mice were injected subcutaneously once a week for six weeks (for a total of 7 treatments) with 25 mg/kg of conjugated modified oligonucleotides. One group of male CD-1 mice was injected with PBS. Mice were euthanized 48 hours following the final administration.

### Study 1

### Plasma Chemistry Markers

[0535] To evaluate the effect of conjugated modified oligonucleotides on liver function, plasma levels of blood urea nitrogen (BUN), albumin, alanine aminotransferase (ALT), aspartate aminotransferase (AST), and creatinine (CREA) were measured using an automated clinical chemistry analyzer (Hitachi Olympus AU400c, Melville, N.Y.). The results are presented in the table below.

TABLE 81
Plasma chemistry markers in male CD-1 mice

| ION | Albumin | ALT | AST | CREA | BUN |
|---|---|---|---|---|---|
| NO. | (g/dL) | (IU/L) | (IU/L) | (mg/dL) | (mg/dL) |
| PBS | 2.5 | 25 | 52 | 0.2 | 23 |
| 1310535 | 2.6 | 32 | 44 | 0.2 | 24 |
| 1371966 | 2.7 | 31 | 40 | 0.2 | 23 |
| 1371968 | 2.7 | 26 | 42 | 0.2 | 23 |
| 1371969 | 2.6 | 28 | 59 | 0.2 | 24 |
| 1371970 | 2.6 | 277 | 225 | 0.2 | 24 |
| 1371971 | 2.8 | 41 | 74 | 0.2 | 24 |
| 1371972 | 2.4 | 810 | 568 | 0.2 | 24 |
| 1371973 | 2.3 | 50 | 78 | 0.2 | 22 |
| 1371974 | 2.7 | 60 | 61 | 0.2 | 25 |
| 1371976 | 2.7 | 32 | 61 | 0.2 | 22 |
| 1371978 | 2.7 | 51 | 59 | 0.2 | 21 |
| 1371979 | 2.7 | 32 | 70 | 0.2 | 23 |

### Body and Organ Weights

[0536] Body weights of CD-1 mice were measured at days 1 and 44, and the average body weight for each group is presented in the table below. Liver, kidney and spleen weights were measured at the end of the study and are presented in the table below.

TABLE 82
Body and organ weights (in grams)

| ION | Body Weight (g) | | Liver | Kidney | Spleen |
|---|---|---|---|---|---|
| No. | Day 1 | Day 44 | (g) | (g) | (g) |
| PBS | 34 | 42 | 2.4 | 0.5 | 0.1 |
| 1310535 | 33 | 42 | 2.4 | 0.6 | 0.1 |
| 1371966 | 32 | 39 | 2.2 | 0.6 | 0.1 |
| 1371968 | 30 | 38 | 2.1 | 0.5 | 0.1 |
| 1371969 | 33 | 43 | 2.4 | 0.5 | 0.1 |
| 1371970 | 29 | 36 | 2.1 | 0.5 | 0.1 |
| 1371971 | 33 | 41 | 2.5 | 0.6 | 0.2 |
| 1371972 | 33 | 40 | 3.1 | 0.7 | 0.2 |
| 1371973 | 31 | 38 | 1.7 | 0.5 | 0.1 |
| 1371974 | 34 | 40 | 2.4 | 0.6 | 0.1 |
| 1371976 | 32 | 40 | 2.4 | 0.6 | 0.1 |
| 1371978 | 32 | 38 | 2.4 | 0.5 | 0.1 |
| 1371979 | 33 | 38 | 2.3 | 0.6 | 0.1 |

### Hematology Assays

[0537] Blood obtained from mouse groups at week 6 and was sent to IDEXX BioResearch for measurement of hematocrit (HCT), and platelet counts (PLT). The results are presented in the table below.

TABLE 83
Blood cell counts in male CD-1 mice

| ION NO. | HCT (%) | PLT (10⁹/L) |
|---|---|---|
| PBS | 46 | 1155 |
| 1310535 | 50 | 1389 |
| 1371966 | 46 | 1415 |
| 1371968 | 47 | 1372 |
| 1371969 | 45 | 1059 |
| 1371970 | 48 | 1395 |
| 1371971 | 46 | 1244 |
| 1371972 | 44 | 1360 |
| 1371973 | 47 | 968 |
| 1371974 | 45 | 1362 |
| 1371976 | 49 | 1199 |
| 1371978 | 47 | 1417 |
| 1371979 | 48 | 1190 |

### Study 2

### Plasma Chemistry Markers

[0538] To evaluate the effect of modified oligonucleotides on liver function, plasma levels of blood urea nitrogen (BUN), albumin, alanine aminotransferase (ALT), aspartate aminotransferase (AST), and creatinine (CREA) were measured using an automated clinical chemistry analyzer (Hitachi Olympus AU400c, Melville, N.Y.). The results are presented in the table below.

TABLE 84
Plasma chemistry markers in male CD-1 mice

| ION | Albumin | ALT | AST | CREA | BUN |
|---|---|---|---|---|---|
| NO. | (g/dL) | (IU/L) | (IU/L) | (mg/dL) | (mg/dL) |
| PBS | 2.8 | 36 | 57 | 0.11 | 19 |
| 1371981 | 2.7 | 26 | 39 | 0.14 | 24 |
| 1373086 | 2.6 | 39 | 59 | 0.12 | 24 |
| 1373087 | 2.6 | 31 | 54 | 0.13 | 23 |
| 1373089 | 2.5 | 107 | 88 | 0.12 | 24 |
| 1373090 | 2.5 | 27 | 45 | 0.11 | 25 |
| 1373094 | 2.8 | 687 | 532 | 0.15 | 23 |
| 1373096 | 2.7 | 57 | 87 | 0.13 | 23 |
| 1373097 | 2.4 | 67 | 71 | 0.13 | 23 |
| 1373098 | 2.5 | 67 | 73 | 0.12 | 24 |
| 1373099 | 2.7 | 43 | 75 | 0.12 | 22 |
| 1373100 | 2.7 | 373 | 365 | 0.12 | 25 |
| 1373101 | 2.5 | 153 | 179 | 0.14 | 23 |

### Body and Organ Weights

[0539] Body weights of CD-1 mice were measured at days 1 and 42, and the average body weight for each group is presented in the table below. Liver, kidney and spleen weights were measured at the end of the study and are presented in the table below.

TABLE 85
Body and organ weights (in grams)

| ION | Body Weight (g) | | Liver | Kidney | Spleen |
|---|---|---|---|---|---|
| No. | Day 1 | Day 42 | (g) | (g) | (g) |
| PBS | 27 | 38 | 1.9 | 0.6 | 0.1 |
| 1371981 | 27 | 39 | 2.5 | 0.6 | 0.1 |
| 1373086 | 27 | 38 | 2.1 | 0.5 | 0.1 |
| 1373087 | 27 | 40 | 2.4 | 0.6 | 0.1 |
| 1373089 | 26 | 39 | 2.8 | 0.5 | 0.1 |
| 1373090 | 27 | 38 | 2.4 | 0.5 | 0.2 |
| 1373094 | 28 | 41 | 2.9 | 0.6 | 0.2 |
| 1373096 | 27 | 42 | 2.5 | 0.6 | 0.2 |
| 1373097 | 27 | 42 | 2.52 | 0.49 | 0.17 |
| 1373098 | 27 | 39 | 2.48 | 0.51 | 0.13 |
| 1373099 | 27 | 39 | 2.44 | 0.61 | 0.14 |
| 1373100 | 26 | 37 | 2.11 | 0.52 | 0.16 |
| 1373101 | 29 | 45 | 2.68 | 0.63 | 0.20 |

### Hematology Assays

[0540] Blood obtained from mouse groups at week 6 and was sent to IDEXX BioResearch for measurement of hematocrit (HCT), platelet counts (PLT), neutrophil counts (NEU), reticulocyte counts (RET) and lymphocyte counts (LYM). The results are presented in the table below.

TABLE 86
Blood cell counts in male CD-1 mice

| ION | HCT | PLT | NEU | RET | LYM |
|---|---|---|---|---|---|
| NO. | (%) | (10³/μL) | (%) | (%) | (%) |
| PBS | 45 | 1150 | 19 | 3 | 77 |
| 1371981 | 46 | 1398 | 18 | 3 | 76 |
| 1373086 | 44 | 1415 | 17 | 3 | 74 |
| 1373087 | 42 | 1343 | 21 | 3 | 73 |
| 1373089 | 43 | 1216 | 21 | 3 | 72 |
| 1373090 | 42 | 1332 | 21 | 3 | 52 |
| 1373094 | 44 | 1307 | 24 | 3 | 68 |
| 1373096 | 47 | 1161 | 19 | 3 | 69 |
| 1373097 | 42 | 1394 | 25 | 3 | 67 |
| 1373098 | 44 | 1432 | 24 | 4 | 68 |
| 1373099 | 44 | 1201 | 20 | 3 | 75 |
| 1373100 | 41 | 1031 | 16 | 3 | 77 |
| 1373101 | 45 | 1236 | 28 | 4 | 65 |

### Study 3

### Plasma Chemistry Markers

[0541] To evaluate the effect of modified oligonucleotides on liver function, plasma levels of blood urea nitrogen (BUN), albumin, alanine aminotransferase (ALT), aspartate aminotransferase (AST), total bilirubin (TBIL) and creatinine (CREA) were measured using an automated clinical chemistry analyzer (Hitachi Olympus AU400c, Melville, N.Y.). The results are presented in the table below.

TABLE 87
Plasma chemistry markers in male CD-I mice

| ION | Albumin | ALT | AST | CREA | BUN | TBIL |
|---|---|---|---|---|---|---|
| NO. | (g/dL) | (IU/L) | (IU/L) | (mg/dL) | (mg/dL) | (mg/dL) |
| PBS | 2.8 | 25 | 56 | 0.1 | 26 | 0.2 |
| 1394140 | 2.9 | 38 | 72 | 0.2 | 24 | 0.2 |
| 1394142 | 2.5 | 67 | 92 | 0.1 | 23 | 0.2 |
| 1394143 | 2.7 | 30 | 55 | 0.1 | 22 | 0.2 |
| 1394144 | 2.7 | 37 | 69 | 0.1 | 24 | 0.2 |
| 1394145 | 2.7 | 50 | 67 | 0.1 | 25 | 0.1 |
| 1394146 | 2.8 | 142 | 203 | 0.1 | 24 | 0.2 |
| 1394147 | 2.5 | 63 | 80 | 0.1 | 25 | 0.1 |
| 1394148 | 3.1 | 219 | 193 | 0.1 | 23 | 0.2 |
| 1394149 | 2.9 | 746 | 757 | 0.2 | 25 | 0.3 |
| 1394150 | 2.7 | 608 | 451 | 0.1 | 22 | 0.2 |

### Body and Organ Weights

[0542] Body weights of CD-1 mice were measured at days 1 and 39, and the average body weight for each group is presented in the table below. Liver, kidney and spleen weights were measured at the end of the study and are presented in the table below.

TABLE 88
Body and organ weights (in grams)

| ION | Body Weight (g) | | Liver | Kidney | Spleen |
|---|---|---|---|---|---|
| No. | Day 1 | Day 39 | (g) | (g) | (g) |
| PBS | 29 | 36 | 1.8 | 0.5 | 0.1 |
| 1394140 | 28 | 36 | 2.0 | 0.5 | 0.1 |
| 1394142 | 30 | 38 | 1.8 | 0.5 | 0.2 |
| 1394143 | 29 | 37 | 2.1 | 0.5 | 0.1 |
| 1394144 | 29 | 37 | 2.1 | 0.5 | 0.1 |
| 1394145 | 30 | 38 | 2.4 | 0.5 | 0.2 |
| 1394146 | 29 | 37 | 2.1 | 0.5 | 0.1 |
| 1394147 | 31 | 38 | 2.5 | 0.5 | 0.2 |
| 1394148 | 29 | 37 | 2.6 | 0.5 | 0.2 |
| 1394149 | 27 | 35 | 2.3 | 0.4 | 0.1 |
| 1394150 | 27 | 35 | 2.3 | 0.5 | 0.2 |

### Hematology Assays

[0543] Blood obtained from mouse groups at week 6 were sent to IDEXX BioResearch for measurement of hematocrit (HCT), platelet counts (PLT), neutrophil counts (NEU), reticulocyte counts (RET) and lymphocyte counts (LYM). The results are presented in the table below.

TABLE 89
Blood cell counts in male CD-1 mice

| ION | HCT | PLT | NEU | RET | LYM |
|---|---|---|---|---|---|
| NO. | (%) | (10³/μL) | (%) | (%) | (%) |
| PBS | 53 | 1271 | 17 | 3 | 74 |
| 1394140 | 52 | 1221 | 20 | 3 | 72 |
| 1394142 | 50 | 1249 | 28 | 3 | 64 |
| 1394143 | 50 | 1165 | 17 | 3 | 76 |
| 1394144 | 49 | 1090 | 18 | 3 | 75 |
| 1394145 | 52 | 1292 | 21 | 3 | 73 |
| 1394146 | 50 | 1382 | 27 | 3 | 66 |
| 1394147 | 52 | 1343 | 22 | 3 | 69 |
| 1394148 | 52 | 1286 | 27 | 3 | 64 |
| 1394149 | 46 | 1613 | 26 | 3 | 66 |
| 1394150 | 47 | 1444 | 13 | 2 | 79 |

### Example 9: Tolerability of Modified Oligonucleotides Targeting Human HSD17B13 in Sprague-Dawley Rats

[0544] Sprague-Dawley rats are a multipurpose model used for safety and efficacy evaluations. In this study, the rats were treated with Ionis conjugated modified oligonucleotides from the studies described in the Examples above and evaluated for changes in the levels of various plasma chemistry markers.

### Treatment

[0545] Male Sprague-Dawley rats were maintained on a 12-hour light/dark cycle and fed ad libitum with Purina normal rat chow. Groups of 4 Sprague-Dawley rats each were weekly injected subcutaneously with 25 mg/kg of conjugated modified oligonucleotide for 6 weeks (total 7 doses). 72 hours after the last dose, rats were euthanized; and organs, urine and plasma were harvested for further analysis.

### Study 1

### Plasma Chemistry Markers

[0546] To evaluate the effect of the conjugated modified oligonucleotides on hepatic function, plasma levels of transaminases were measured using an automated clinical chemistry analyzer (Hitachi Olympus AU400c, Melville, N.Y.). Plasma levels of ALT (alanine transaminase) and AST (aspartate transaminase) were measured and the results are presented in the Table below expressed in IU/L. Plasma levels of creatinine (CREA), albumin, and Blood Urea Nitrogen (BUN) were also measured using the same clinical chemistry analyzer and the results are also presented in the table below.

TABLE 90
Plasma chemistry markers in Sprague-Dawley rats

| ION | Albumin | ALT | AST | CREA | BUN |
|---|---|---|---|---|---|
| NO. | (g/dL) | (IU/L) | (IU/L) | (mg/dL) | (mg/dL) |
| PBS | 3.4 | 34 | 53 | 0.3 | 13 |
| 1310535 | 3.2 | 35 | 68 | 0.3 | 14 |
| 1371966 | 3.5 | 33 | 66 | 0.3 | 16 |
| 1371968 | 3.8 | 36 | 57 | 0.4 | 16 |
| 1371969 | 3.0 | 25 | 68 | 0.3 | 16 |
| 1371970 | 3.4 | 48 | 101 | 0.3 | 15 |
| 1371971 | 3.6 | 34 | 72 | 0.3 | 16 |
| 1371972 | 3.5 | 51 | 76 | 0.4 | 15 |
| 1371973 | 3.6 | 36 | 62 | 0.3 | 14 |
| 1371974 | 3.3 | 37 | 76 | 0.4 | 15 |
| 1371976 | 3.4 | 31 | 55 | 0.3 | 15 |
| 1371978 | 3.4 | 37 | 67 | 0.3 | 15 |
| 1371979 | 3.5 | 117 | 122 | 0.3 | 12 |

### Hematology Assays

[0547] Blood obtained from mouse groups at week 6 and was sent to IDEXX BioResearch for measurement of hematocrit (HCT), and platelet counts (PLT). The results are presented in the table below.

TABLE 91
Blood Cell Count in Sprague-Dawley Rats

| ION NO. | HCT (%) | PLT (10⁹/L) |
|---|---|---|
| PBS | 47 | 849 |
| 1310535 | 43 | 954 |
| 1371966 | 46 | 844 |
| 1371968 | 47 | 1010 |
| 1371969 | 43 | 810 |
| 1371970 | 48 | 1016 |
| 1371971 | 46 | 893 |
| 1371972 | 46 | 1019 |
| 1371973 | 44 | 857 |
| 1371974 | 46 | 930 |
| 1371976 | 45 | 843 |
| 1371978 | 45 | 900 |
| 1371979 | 47 | 1077 |

### Kidney Function

[0548] To evaluate the effect of the conjugated modified oligonucleotides on kidney function, urinary levels of total protein and creatinine were measured using an automated clinical chemistry analyzer (Hitachi Olympus AU400c, Melville, N.Y.). The ratios of total protein to creatinine (P/C ratio) are presented in the table below.

TABLE 92
Total protein to creatinine ratio in Sprague-Dawley rats

| ION NO. | Urine P/C Ratio |
|---|---|
| PBS | 0.5 |
| 1310535 | 0.4 |
| 1371966 | 0.8 |
| 1371968 | 0.7 |
| 1371969 | 0.6 |
| 1371970 | 0.6 |
| 1371971 | 1.1 |
| 1371972 | 0.4 |
| 1371973 | 0.7 |
| 1371974 | 0.8 |
| 1371976 | 0.7 |
| 1371978 | 0.5 |
| 1371979 | 0.8 |

### Body and Organ Weights

[0549] Body weights of Sprague-Dawley rats were measured at days 1 and 40, and the average body weight for each group is presented in the table below. Liver, heart, spleen and kidney weights were measured at the end of the study and are presented in the table below.

TABLE 93
Body and Organ weights In Sprague-Dawley rats (g)

| ION | Body Weight (g) | | | Kidney | Spleen |
|---|---|---|---|---|---|
| No. | Day 1 | Day 40 | Liver (g) | (g) | (g) |
| PBS | 140 | 464 | 18 | 3.2 | 1.1 |
| 1310535 | 152 | 476 | 20 | 3.7 | 1.5 |
| 1371966 | 150 | 437 | 17 | 3.1 | 1.0 |
| 1371968 | 147 | 419 | 15 | 2.9 | 1.0 |
| 1371969 | 151 | 423 | 16 | 3.5 | 2.0 |
| 1371970 | 151 | 440 | 16 | 2.9 | 1.1 |
| 1371971 | 138 | 406 | 17 | 3.1 | 1.4 |
| 1371972 | 144 | 424 | 12 | 2.7 | 1.0 |
| 1371973 | 141 | 401 | 14 | 3.0 | 1.3 |
| 1371974 | 143 | 443 | 16 | 3.0 | 1.1 |
| 1371976 | 126 | 412 | 16 | 2.8 | 1.0 |
| 1371978 | 155 | 452 | 17 | 3.3 | 1.3 |
| 1371979 | 148 | 458 | 19 | 3.1 | 1.3 |

### Study 2

### Plasma Chemistry Markers

[0550] To evaluate the effect of the conjugated modified oligonucleotides on hepatic function, plasma levels of transaminases were measured using an automated clinical chemistry analyzer (Hitachi Olympus AU400c, Melville, N.Y.). Plasma levels of ALT (alanine transaminase) and AST (aspartate transaminase) were measured and the results are presented in the Table below expressed in IU/L. Plasma levels of creatinine (CREA), albumin, and Blood Urea Nitrogen (BUN) were also measured using the same clinical chemistry analyzer and the results are also presented in the table below.

TABLE 94
Plasma chemistry markers in Sprague-Dawley rats

| ION | Albumin | ALT | AST | CREA | BUN |
|---|---|---|---|---|---|
| NO. | (g/dL) | (IU/L) | (IU/L) | (mg/dL) | (mg/dL) |
| PBS | 3.6 | 33 | 56 | 0.3 | 16 |
| 1371981 | 3.7 | 35 | 57 | 0.3 | 17 |
| 1373086 | 3.7 | 35 | 87 | 0.4 | 19 |
| 1373087 | 3.3 | 33 | 64 | 0.4 | 18 |
| 1373089 | 3.7 | 92 | 129 | 0.3 | 18 |
| 1373090 | 3.5 | 38 | 72 | 0.4 | 18 |
| 1373094 | 3.7 | 187 | 311 | 0.4 | 16 |
| 1373096 | 3.3 | 69 | 171 | 0.3 | 18 |
| 1373097 | 3.2 | 40 | 86 | 0.3 | 17 |
| 1373098 | 3.8 | 37 | 74 | 0.3 | 17 |
| 1373099 | 3.6 | 33 | 60 | 0.4 | 16 |
| 1373100 | 3.1 | 39 | 115 | 0.3 | 20 |
| 1373101 | 3.4 | 37 | 80 | 0.3 | 14 |

### Hematology Assays

[0551] Blood obtained from mouse groups at week 6 were sent to IDEXX BioResearch for measurement of hematocrit (HCT), and platelet counts (PLT), neutrophil counts (NEU), reticulocyte counts (RET) and lymphocyte counts (LYM). The results are presented in the table below.

TABLE 95
Blood Cell Count in Sprague-Dawley Rats

| ION | HCT | PLT | NEU | RET | LYM |
|---|---|---|---|---|---|
| NO. | (%) | (10³/μL) | (%) | (%) | (%) |
| PBS | 51 | 709 | 14 | 3 | 72 |
| 1371981 | 52 | 769 | 11 | 2 | 84 |
| 1373086 | 47 | 921 | 8 | 2 | 88 |
| 1373087 | 50 | 764 | 6 | 3 | 89 |
| 1373089 | 49 | 1217 | 7 | 3 | 88 |
| 1373090 | 50 | 766 | 10 | 4 | 85 |
| 1373094 | 53 | 943 | 14 | 2 | 81 |
| 1373096 | 61 | 376 | 6 | 3 | 89 |
| 1373097 | 49 | 746 | 5 | 3 | 90 |
| 1373098 | 49 | 929 | 10 | 3 | 85 |
| 1373099 | 47 | 717 | 8 | 3 | 85 |
| 1373100 | 42 | 823 | 6 | 4 | 87 |
| 1373101 | 48 | 693 | 7 | 3 | 87 |

### Kidney Function

[0552] To evaluate the effect of Ionis oligonucleotides on kidney function, urinary levels of total protein and creatinine were measured using an automated clinical chemistry analyzer (Hitachi Olympus AU400c, Melville, N.Y.). The ratios of total protein to creatinine (P/C ratio) are presented in the table below.

TABLE 96
Total protein to creatinine ratio in Sprague-Dawley rats

| ION NO. | Urine P/C Ratio |
|---|---|
| PBS | 1.0 |
| 1371981 | 1.7 |
| 1373086 | 1.5 |
| 1373087 | 1.7 |
| 1373089 | 1.5 |
| 1373090 | 1.3 |
| 1373094 | 3.3 |
| 1373096 | 1.5 |
| 1373097 | 1.3 |
| 1373098 | 1.2 |
| 1373099 | 1.9 |
| 1373100 | 0.9 |
| 1373101 | 1.7 |

### Body and Organ Weights

[0553] Body weights of Sprague-Dawley rats were measured at days 1 and 44, and the average body weight for each group is presented in the table below. Liver, heart, spleen and kidney weights were measured at the end of the study and are presented in the table below.

TABLE 97
Body and Organ weights In Sprague-Dawley rats (g)

| ION | Body Weight (g) | | Liver | Kidney | Spleen |
|---|---|---|---|---|---|
| No. | Day 1 | Day 44 | (g) | (g) | (g) |
| PBS | 146 | 458 | 19 | 3.1 | 1.0 |
| 1371981 | 141 | 424 | 21 | 3.4 | 1.1 |
| 1373086 | 151 | 434 | 19 | 3.0 | 1.8 |
| 1373087 | 143 | 433 | 19 | 3.3 | 1.3 |
| 1373089 | 149 | 431 | 21 | 3.5 | 2.1 |
| 1373090 | 142 | 453 | 19 | 3.2 | 1.3 |
| 1373094 | 142 | 449 | 19 | 3.2 | 1.4 |
| 1373096 | 149 | 460 | 23 | 3.6 | 3.2 |
| 1373097 | 136 | 400 | 17 | 3.3 | 2.2 |
| 1373098 | 130 | 389 | 20 | 2.9 | 1.5 |
| 1373099 | 152 | 421 | 16 | 2.9 | 1.6 |
| 1373100 | 146 | 453 | 19 | 4.2 | 2.3 |
| 1373101 | 140 | 412 | 17 | 2.9 | 1.5 |

### Study 3

### Plasma Chemistry Markers

[0554] To evaluate the effect of the conjugated modified oligonucleotides on hepatic function, plasma levels of transaminases were measured using an automated clinical chemistry analyzer (Hitachi Olympus AU400c, Melville, N.Y.). Plasma levels of ALT (alanine transaminase) and AST (aspartate transaminase) were measured and the results are presented in the Table below expressed in IU/L. Plasma levels of creatinine (CREA), albumin, total bilirubin (TBIL) and Blood Urea Nitrogen (BUN) were also measured using the same clinical chemistry analyzer and the results are also presented in the table below.

TABLE 98
Plasma chemistry markers in Sprague-Dawley rats

| ION | Albumin | ALT | AST | CREA | BUN | TBIL |
|---|---|---|---|---|---|---|
| NO. | (g/dL) | (IU/L) | (IU/L) | (mg/dL) | (mg/dL) | (mg/dL) |
| PBS | 3.2 | 41 | 62 | 0.3 | 18 | 0.2 |
| 1394140 | 3.6 | 48 | 123 | 0.4 | 20 | 0.3 |
| 1394142 | 3.0 | 57 | 136 | 0.4 | 23 | 0.2 |
| 1394143 | 3.3 | 122 | 201 | 0.3 | 19 | 0.4 |
| 1394144 | 3.2 | 38 | 73 | 0.4 | 18 | 0.1 |
| 1394145 | 3.6 | 112 | 187 | 0.4 | 17 | 0.2 |
| 1394146 | 3.4 | 54 | 98 | 0.4 | 20 | 0.2 |
| 1394147 | 3.1 | 53 | 110 | 0.3 | 18 | 0.2 |
| 1394148 | 3.5 | 45 | 57 | 0.4 | 19 | 0.3 |
| 1394149 | 3.7 | 94 | 102 | 0.5 | 27 | 0.3 |
| 1394150 | 3.8 | 60 | 83 | 0.4 | 19 | 0.2 |

### Hematology Assays

[0555] Blood obtained from mouse groups at week 6 and was sent to IDEXX BioResearch for measurement of hematocrit (HCT), and platelet counts (PLT), neutrophil counts (NEU), reticulocyte counts (RET) and lymphocyte counts (LYM). The results are presented in the table below.

TABLE 99
Blood Cell Count in Sprague-Dawley Rats

| ION | HCT | PLT | NEU | RET | LYM |
|---|---|---|---|---|---|
| NO. | (%) | (K/μL) | (%) | (%) | (%) |
| PBS | 52 | 795 | 12 | 3 | 84 |
| 1394140 | 45 | 876 | 8 | 3 | 88 |
| 1394142 | 47 | 768 | 4 | 3 | 90 |
| 1394143 | 59 | 1277 | 11 | 2 | 80 |
| 1394144 | 51 | 574 | 6 | 3 | 87 |
| 1394145 | 51 | 806 | 12 | 2 | 82 |
| 1394146 | 48 | 1052 | 11 | 2 | 81 |
| 1394147 | 49 | 922 | 8 | 3 | 85 |
| 1394148 | 49 | 1134 | 12 | 3 | 84 |
| 1394149 | 46 | 1816 | 14 | 3 | 80 |
| 1394150 | 52 | 1094 | 12 | 3 | 83 |

### Kidney Function

[0556] To evaluate the effect of Ionis oligonucleotides on kidney function, urinary levels of total protein and creatinine were measured using an automated clinical chemistry analyzer (Hitachi Olympus AU400c, Melville, N.Y.). The ratios of total protein to creatinine (P/C ratio) are presented in the table below.

TABLE 100
Total protein to creatinine ratio in Sprague-Dawley rats

| ION NO. | Urine P/C Ratio |
|---|---|
| PBS | 0.8 |
| 1394140 | 1.6 |
| 1394142 | 1.1 |
| 1394143 | 1.3 |
| 1394144 | 1.3 |
| 1394145 | 1.1 |
| 1394146 | 1.8 |
| 1394147 | 1.5 |
| 1394148 | 1.0 |
| 1394149 | 1.1 |
| 1394150 | 1.9 |

### Body and Organ Weights

[0557] Body weights of Sprague-Dawley rats were measured at days 1 and 42, and the average body weight for each group is presented in the table below. Liver, heart, spleen and kidney weights were measured at the end of the study and are presented in the table below.

TABLE 101
Body and Organ weights In Sprague-Dawley rats (g)

| ION | Body Weight (g) | | Liver | Kidney | Spleen |
|---|---|---|---|---|---|
| No. | Day 1 | Day 42 | (g) | (g) | (g) |
| PBS | 270 | 503 | 19 | 3.0 | 0.9 |
| 1394140 | 263 | 440 | 19 | 3.0 | 1.5 |
| 1394142 | 258 | 370 | 13 | 2.9 | 1.5 |
| 1394143 | 257 | 393 | 16 | 2.9 | 1.1 |
| 1394144 | 254 | 461 | 18 | 3.2 | 1.5 |
| 1394145 | 266 | 475 | 21 | 3.4 | 1.4 |
| 1394146 | 268 | 444 | 17 | 3.1 | 1.7 |
| 1394147 | 258 | 401 | 17 | 3.2 | 2.0 |
| 1394148 | 267 | 447 | 21 | 3.0 | 1.5 |
| 1394149 | 261 | 422 | 20 | 5.8 | 1.4 |
| 1394150 | 251 | 423 | 18 | 3.0 | 1.2 |

### Example 10: Measurement of Viscosity of Modified Oligonucleotides Targeting Human HSD17B13

[0558] The viscosity of select conjugated modified oligonucleotides from the studies described above was measured.

[0559] Conjugated modified oligonucleotides (within a range of 32-38 mg) were placed into separate glass vials; approximately 100 μL of water was added to each vial, and the conjugated modified oligonucleotides were dissolved into solution by heating the vials to 55° C. A 75 μL portion of the pre-heated sample was pipetted to a micro-viscometer (PAC Cambridge Viscosity Viscometer). The temperature of the micro-viscometer was set to 25° C. and the viscosity of the sample was measured. The 75 uL portion of each sample was then combined with the remaining portion of the original sample, which was then diluted for UV reading at 260 nM (Cary UV instrument). The data is presented in the Table below. Compounds having viscosity of less that 40 cP in this assay are generally suitable for use in therapy.

TABLE 102
Viscosity of modified oligonucleotides

| | Concentration | Concentration | |
|---|---|---|---|
| Compound | by weight | by UV | Viscocity |
| ID | (mg/mL) | (mg/mL) | (cP) |
| 1310535 | 300 | 206 | 6 |
| 1371966 | 300 | 223 | 10 |
| 1371974 | 300 | 207 | 8 |
| 1371976 | 300 | 254 | 64 |
| 1371978 | 300 | 219 | 7 |
| 1371979 | 300 | 244 | 10 |
| 1373086 | 300 | 215 | 7 |
| 1373087 | 300 | 219 | 9 |
| 1373090 | 300 | 191 | 8 |
| 1373097 | 300 | 222 | 6 |
| 1373098 | 300 | 203 | 5 |
| 1373099 | 300 | 242 | 6 |
| 1373101 | 300 | 205 | 11 |
| 1394140 | 300 | 197 | 10 |
| 1394141 | 300 | 225 | 9 |
| 1394142 | 300 | 271 | 24 |
| 1394143 | 300 | 250 | 11 |
| 1394144 | 300 | 257 | 32 |
| 1394145 | 300 | 263 | 10 |
| 1394146 | 300 | 289 | 11 |
| 1394147 | 300 | 246 | 15 |
| 1394148 | 300 | 205 | 9 |
| 1394149 | 300 | 304 | 14 |
| 1394150 | 300 | 202 | 16 |
| 1394151 | 300 | 223 | 8 |
| 1394152 | 300 | 225 | 24 |
| 1371976 | 200 | 151 | 16 |

The application's sequence listing, which the Patent Office published only in electronic form, follows.

SEQUENCE LISTING (2989 sequences)

SEQ ID NO: 1 - DNA, 2397 bp, Homo sapiens
agacagtacctcctccctaggactacacaaggactgaaccagaaggaagaggacagagcaaagccatgaacatcatcctagaaatccttctgcttctgatcaccatcatctactcctacttggagtcgttggtgaagtttttcattcctcagaggagaaaatctgtggctggggagattgttctcattactggagctgggcatggaataggcaggcagactacttatgaatttgcaaaacgacagagcatattggttctgtgggatattaataagcgcggtgtggaggaaactgcagctgagtgccgaaaactaggcgtcactgcgcatgcgtatgtggtagactgcagcaacagagaagagatctatcgctctctaaatcaggtgaagaaagaagtgggtgatgtaacaatcgtggtgaataatgctgggacagtatatccagccgatcttctcagcaccaaggatgaagagattaccaagacatttgaggtcaacatcctaggacatttttggatcacaaaagcacttcttccatcgatgatggagagaaatcatggccacatcgtcacagtggcttcagtgtgcggccacgaagggattccttacctcatcccatattgttccagcaaatttgccgctgttggctttcacagaggtctgacatcagaacttcaggccttgggaaaaactggtatcaaaacctcatgtctctgcccagtttttgtgaatactgggttcaccaaaaatccaagcacaagattatggcctgtattggagacagatgaagtcgtaagaagtctgatagatggaatacttaccaataagaaaatgatttttgttccatcgtatatcaatatctttctgagactacagaagtttcttcctgaacgcgcctcagcgattttaaatcgtatgcagaatattcaatttgaagcagtggttggccacaaaatcaaaatgaaatgaataaataagctccagccagagatgtatgcatgataatgatatgaatagtttcgaatcaatgctgcaaagctttatttcacattttttcagtcctgataatattaaaaacattggtttggcactagcagcagtcaaacgaacaagattaattacctgtcttcctgtttctcaagaatatttacgtagtttttcataggtctgtttttcctttcatgcctcttaaaaacttctgtgcttacataaacatacttaaaaggttttctttaagatattttatttttccatttaaaggtggacaaaagctacctccctaaaagtaaatacaaagagaacttatttacacagggaaggtttaagactgttcaagtagcattccaatctgtagccatgccacagaatatcaacaagaacacagaatgagtgcacagctaagagatcaagtttcagcaggcagctttatctcaacctggacatattttaagattcagcatttgaaagatttccctagcctcttcctttttcattagcccaaaacggtgcaactctattctggactttattacttgattctgtcttctgtataactctgaagtccaccaaaagtggaccctctatatttcctccctttttatagtcttataagatacattatgaaaggtgaccgactctattttaaatctcagaattttaagttctagccccatgataacctttttctttgtaatttatgctttcatatatccttggtcccagagatgtttagacaattttaggctcaaaaattaaagctaacacaggaaaaggaactgtactggctattacataagaaacaatggacccaagagaagaaaaggaagaaagaaaggttttttggtttttgttttgttttgttttgttttttgtttttttgagatggagtctcactctttcgcccaggctggagtgcagtggtatgatctcagctcactgcaagctccacctcccgggttcacgccattctcctgcctcagcctcctgagtagctgggactacaggcgcccgccaccacacccggctaattttttgtattttttgtagagacggggtttcaccatgttagccaagatggtctcgatctcctgacctcgtgatccacctgcctcggcctcccaaagtgctgggattacgggtgtgagccaccgtgcccagcctttttttttttaatagaaaaaataatccgactcccactacatcaagactaatcttgttttgtgtgtttttcacatgtattatagaatgcttttgcatggactatcctcttgtttttattaaaaacaaatgatttttttaaaagtcacaaaaacaattcactaaaaataaatatgtcattgtgctttaaaaaaataacctcttgtagttataaaataaaacgtttgacttctaaactctg

SEQ ID NO: 2 - DNA, 25000 bp, Homo sapiens
aggaggctgaggcacaagaatcacttgaacctgggaggcggaggttgcagcgagctgagattgtaccactgcactccagcctgggcgatagagcgagactccgtctcaaaaacaaacaaaacaaaacaacaacaacaacaacaacaaaatcaagggacaaagtgtatgtttctagcattgttggggcaaatatgaaccctgtaattgaggaacatgaacattccgtcccatagaaaacaagcaaaaagaaaaaaaaagagagagagctcactaggttgtctcatatgaaataaaatttctcagcaaccaaactatttgagaacaatgttaagaagtgttgttcactgtctcaaagattcttaattcttgcataatacaaatatccagtgggtaaaataatctagattccactgtaaattttaaaactgcctttcaaaactgcatcagtactgtattgatttagatagcattggtctggccccctctgagcaagctggatattcaaatatagacattcaatctgaaaacagattcctgcactgcagcccagcatgaggtctgatctaaagcacctatgtcaatatttaacagctccatatacatgtcacagcaaacctgcatgcagaaagatataaccaagtactatttttttgccataaatttatccaaggttcaaactgaaagaaccaattacactgtctccaatataatataagtataggccaggtctcaaccttagttgagggtactcacgtttgggctaaataattcttggtttcaatgcacaaggctttcctatgaattgtaaagtgttcagcagcttccctggcctctacctattagatagatgacagtggcatgcctaaattgtggcaacaaagaatgtctccagacatgccaaaatgtaccctgtggaacaaaagtaatcctagttgagaaccactgatctaagttaaaagttgaggctacagcatcaggcttcctgggtttcaatcctcactccacctcttgccagctgttactttatgcttacaaataagttacctaacttgcctatacatcagtttccacatctgtacaatgcagattttaatagcacctacttcaaatgtatgttgtgaagattaaacaagttgatatgtaaagcccttaaatcagtccatgatatatagtgattaacacattcgcattcttactataattagtatttgatttatataaccattcactacttgcaaaactatttcataaacatattctcttatttgatccttatagccactttgtgtgttggcatatgagggaaggttgaggttgttatgtgctctgaaggtctatgttgggtaatgtgtgcttttttaaaaaatatctattttctagttaaggaaactgtagcatagagaaaataaataggattgctagaaatcacacacacgtaacatacaatttaccattttaactattttgtaatgtacagatcagtagcattaagcacattcacattgttgtataaccatcaccaccattcacctgcggagctttcatcatcctaactgaaactccatactcattaaacaataattccccattccttttctcctcatcccctagtaaccaccttactgctttctgtctctctctgtgtatttgactactctaggtacctcatataaatggagtcatacaatatttatacttttgcatctggcttatttcacttagcataatgtcattaaggttcatctatctagtagtatgtgtcagaatttccttcctttctaaggctgagtaatattccattgcatgtatatatcatattttgtttatctgttgatgaacactggggttgttcccacttcttggctattggaagttgctataggctgcatgtgttccttcaaaattcatattatgaaatcctatctcccagtgtgatggttttaggaagtgagacctttgggaggtgattaggtcatgagagctctgccatgggaataattgcccttatacaagagaacacggagggtttccttcctccttctgccacttgaggtgacagtgaaatgacagccatctatcaaccaggaagccagctcttaccagacaaagaatatgccagcgccttgatcttggacttcttgtgagaaataagtttctggaatttataaaccacctggtcaatggtaatttgttacagcagcagacaaagacagaagccaccccactttaaagttgagattcccgactcctggtctaatgctctttccagtattatcacaaagggaactgatggttctgtatcctaaaatctcccccaaactcaagagattttcagggaaatggtcatcatgtgtaaaataattagccagttgaaatattgatgctgagcttttgtgaataaatgaatcaaatagctaagctgggttcattcagactttatctaagtttctttaagcttatctctacattctcctttttcatattgaaaaaaggtaacaatttccagaaagataccaacagatcattagctgatgcagtatctccagaattctttttcttttttttttagaccaggccttgttctgttgcttaggctggagcgcagtggcacaatcacagctcactgcaccacgaactcatggactgaagcaatcctcctgcctcagcctcctgggtagctgggactacagacacatgccaccatatccagctaatttttttctatagtttttttttttttttttgagacagggtcttactatgttgcccagactggtctcgaactcctgggctcaagcaatcctctgcctcagcctcccaaagtgctgggattacagatgtgagccactgcacctggcccctagaattgtttctagaggtgaaacttcaaggtgaaatatagtacataactgcttttcagataaacaagtccagagagcacactctcttgtgctcttggcatcacttggcatcacttcatatttgaggtgtttcaaacccattagaacacgtgaacaaggcctgcttccaaagctggcttccatctggtagtcccattaacaactgggcacaccccttccctagagctctgtgtagacagtacctcctccctaggactacacaaggactgaaccagaaggaagaggacagagcaaagccatgaacatcatcctagaaatccttctgcttctgatcaccatcatctactcctacttggagtcgttggtgaagtttttcattcctcagaggagaaaatctgtggctggggagattgttctcattactggagctgggcatggaataggcaggcagactacttatgaatttgcaaaacgacagagcatattggttctgtgggatattaataaggtaatgtatacatcttccaactttttaaagtcacagagtaagatatgtattttaagaattatttgacttaccatctacttatctttgtatttttgtttttcaaagtttgataaattccctggtcccttagtctgtatatgtgtcaggttagttagatgaagggaatgtaattaagaactaagcagcgatttttatgacatggtgtgcaggttgatagaaagactcaggagccagtctccttccaagctgctaaatgaggcaagtcacatattatctctcagcctgttttcttggctctgaagtggggataataacttaggggatgggcaagaacgggatctgaaaattacagctacaaacaaaagtcaaacgaagaacttgcaacagaaacctttagtgcctcccctcatgcacaagcaacacagttctaaaatatttactgtctgaccctttacagaaaatgtttgccagtccgtagtcaaaaggattaaataagtaatattttcagcacttagcatatgataaacgatacgtggcacatgataaacaataactgtgttaaataaaatatgtgcgcagtgagtcaggcttttccttggacattagtatttttcctgtgttcttacttgtaaacactacattaacaaccccaaataaaactgaaggaactgaaatcttgtatcattttctctaaacttgtaaattctggtaaggccatgaaaatatatgcagagaagtgtttacaggattttaggattggaaaaattgtgaagtactccttgagaatcacattttctgcaaattacagtggttttaattaccattatattattactttctcatgttctttgctgtcatgtttagttgaaacctaaaatgtctcttacacttagagaactaattcttttctgttttttttctgaatagtgaagaatactatacaaaaaagctactacatttttatttaacagatatgagcatttatataatagaggagttgatgtatataaaaatgatttgccatctttttggtctttgaagaaattcgaatgaactttctggaagatagcaagaatttacaaatagagaaaattgttgcctgctgttctcaggcatttgtccaaaaatataaataagtataaatctatgaaaagggcttgatgaaatctaaccttcaaatctctttccagatgtgtatttttggggaaagggctatatttattaagttttttttaaattttaaaatttccagagacaagagaaaagtaaattagaaggaagtcgtattaaaaatgacttaagggcgggtgcagtggctcacacctgtaatcccagcactttgggagacggaggtgggcagattgctggagcccaggagttcaagaccagcctgggcagcacagcaaaacccccaactctacaaaaaatacaaaaattagctgggtgcgggggtgcacacccgtagtcccagctactcgggaggctgaggtgggaggatcgtttcagttcaggaagccaaggctgcaatgagctatgatggcatcattgcactccaagctgggcaatagagccaggctctgtctcaaaaaaaataaaaaaagacttaagaaaaataggtaacccaacctcaaaaattctctttgaatcattaaatttcatggttaaacatttaagctactgaatgattcactctaaggctgtaatgtaactcagatctcctttaggcgaggaagatgctggctgagttttcatcataactggctccttttgccctgtgagatgagagacacagtagcagtttggctcttatgcaatctaaactgttgcgttgggaatacggttcaaaaaacacattggagtttaagctaaagcaagtgttttgctaacaaaaagacaaggcatcacattttgcaattgtctagctcagttataaaacagaagaataggccggacgcggtggctcacgcctgtaatcccagcactttgggaggccgagacgggcggatcacgaggtcaggagatcgagaccatcctggataacacagtgaaaccccgtctctactaaaaatacaaaaaaattagccaggcgtagtggcgggcgcctgtagtcccagctactcgggaggctgaggcaggagaatggtgtgaacccgggaggcggagcttgcagtgagccgagatgacgccactgcactccagcctgggcgacagagcgagactccgtctcaaaaaaaaaaaaaaaaaaaaaactgaagaataattaattcttcaatcaaaacatctgatgaatgctctggtaacttatgctctctactgacctagaaacaaatgagagagtatggtgtggtttgtgcaatctggcagtgagcaagctaccaactaaatcagtgaaagactctcctattctttttttactcttctgcaatcccacaaaaggctatttgaggggatactgactttgagactgggtcctaacatccatgtttggggagttcaggctgctgctccagggtttagcctacagtagcgaaatacaaaggacccagagaccactcattcaaggtttgccctaaatagcagcaacaccactgtcatctcaatacacgaagaatagggcttttcaggtatccttgcctctttgtcacagagaagagtttacagattgtgagacggaaaagtataatttttaaaaccttataatattttctataaaagtcacctgaggtgaaaacttgaaaagaattataattttccagaatgtgagtcaagaaacattagagcaattttatcttaggaaagaggtctttgaatttaggctgaaagtaaattgctctgtctccatgtcctatggttatgggcaagtttggtacataaatgagaaatccatccagtggccttgcccatctcactcccaaacacctgaagaatgtaatgttatatctcctagagtagcagcatggtctccctatgaaagtccttcttctttaaggagacttctttcccttccctcctaggaggatgagtcagaatcatcaagaaaaatatgatgggcagaggcatacagtttaccattaccactagtttagaattactacttagcactttactgcctattacatagttggtgctcaacaaatgtatgataaattaatggttgagtttttctttcttctccatattcatcttccatgacaccacgaagagcaatgtttttcaagaatgttcttcaaggtttgaaagtagcctgctttagagaaactgcctactgtacagcctccaaccaagaggaaaagctgaaaaaagcatgaagggattttgttttgttttgtttgttttggttttaatatgagcattccctggcagaaaagccaggggtaatctcattgcaactaggcaatcactctcaagaaattttctaacaaataaggaggccaatttttattttattttgagacgaagtcccactctgtcacccaggttggagtgcaatggaatgatttcagctcactgcaacctccgcctcccgggttcaagtgattctcctgtctaaacttcccgagtagctgggattacaggctcccaccaccacgcccagctaattttttgtatttttagtagagatggggtttcaccattttggccagactggtctcaaactcctgacctcaagtgatccaccctcctcggcctcctaaagtgctgggattacaggcgtgagccaccacacctgacccaggaggccaatttttaaaaggttaactaatcttcatgtccaaaatgaatgttaattgttcattttggacatgaatgttaattttttttttttttttttttgagacagagtctcactctgttgcccaggctggagtccagtggcactatctccactcactgcaacttcctcctcccaggttcaagcaattatcctgcctcagcctcccaagtagctgggattacaggcccacaccatcaggcctggctaatttttgtatttttagtagagacggggtttcaccatgttggccaggctggtcttgaactcctgacctcgtgatccgccctcctcggccaaccaaagtgctgggattacaggcgtgagccaccgcgcctagccgaatgttaattgtctaaaaatttttcttctccaatgtcttctcctccacttttttcggaatttgtttcttcctaattacagcgcggtgtggaggaaactgcagctgagtgccgaaaactaggcgtcactgcgcatgcgtatgtggtagactgcagcaacagagaagagatctatcgctctctaaatcaggtgagactgcaggttcacaaatttcttcagattattttgtttcctaggacgctgacgtggaaaatgagaaaggtctttatgactgcctgatttaaattggattttagctgctaactgaagtagttatgtcaccaaggaaggatatatactttttttcttgtatgtaatccactcagctctgcccattattattgttcatattattaatcaatttcattctgatcagaagtgtgagcagtggcacagagtgactgacaaaagatttatcatcagggaatatggatcacttcctagttttgttttagtcctattaactttgcagtaattccagcttctctttaattatttcccttgtgagattttattttggtgttaatgtagtcttctgtagaaaatgtaatattaataattattatcacaattattttaaaagagtaaataccaaataatcacaatgaactaagcactctaacaaactttacattttttaattcaatccctacaataactctgtaaacttcattttacagataagcaaattatgactcagagaggttaagccagacccaggtcatgtagttattaggttatgaaaccaggatttctcaaccagcactttagaccaggtgcggtggttcacacatgtaatcccagcactttgtgaggccaaggtggaaggatcacatgagaccaagagttcaagaccagcccaggcaacatagtgagaccctatctctaaaaaaaaaaaaaaaaaaaaaaaaaaaagtttaaagaaaaacacatttttaaaaaatgaacactttaaaaatatttggtcagaatttatataggaatttatcaacataaatgttaatttcactttactgataaacttgcaaaacatgatgtgctgggtactgaaatttagatgttaaaagaacagtttatcccacctttatgacagtgttcccttggcctccacgatttgagctcaacagtctgtcttgcctgaactctgagagacctcatacaatagaagaaagactctcatctttggattatattggtcccaaaactttgagtttgaataatacacccagtgaaagtgttctttcaatttcaaaaggtgaagaaagaagtgggtgatgtaacaatcgtggtgaataatgctgggacagtatatccagccgatcttctcagcaccaaggatgaagagattaccaagacatttgaggtcaacatcctaggacatttttgggtgagtgtgagtcagaaacatttctgatttgtgcaccttctcttaagatacatgaaacttataacggagttcacatacttctggacaggaaactggccagatctttgccttaatcaagaatcattaaatttgtttgagtagaagagccacagagtctctgacacaaggacacagaattcaagtggacacaacacaccagaatgtaagctacttggtctgtcttgtccaccagtatctgacacaaagcttggcatgtaccaggagctcaacaaatgtttgtggaggtttgttaagggttgtcagtgtacatcttttcaatgctgtcacttgtgacttcatttttttccctccacaccatgattttgtaatgtgtcctcattttgtggaattttagaatggaaaggacatcagaagtaattacttggatgtatataggatcgaggacacttttggacgagactctgaggcaagtgttctagatccatggggtgctggaactgagaaatgcagctatacagacctcatataattggttagttttgtgggagatggaaatatcaacttcaactgcctttgtatagaaatttttatgattaatcttccagtgcctcaatattagtgtagaatctagggcagatctggattctagaagaaagaagaaaaaaaagagatgtgtcccccttacctttaccagctcttcacatatgtgaattggctcccatgcccaccaaactacacggagacctcatacattagctacctatagctgcataacaaattatacaaaacttagtggtttaaagcaacaatgtatgttcactatcctctcacagtttctatgggttgggaatttggaggtagcttgggttgggagttctagttctatgaatttgcataggatttattaaattcttataaaattttattgatgtttctcacaaaagaggtttttggaaaaaaagaaagacttgttttctgtaacatcaacatataatatacaatattacaaatagggagatagtgaattcaatcatgattcattagtgtggtgtagaactctcagcttacactactcaactgtcttaatacagttacacaagatttcactcttttaattagaatgataaagccccaaaccaaaaaattatatgacaccaaattatcataaggaataattttagttctgaaaactctgaatttttcccttaatattgtttagatgacatatccaaaaaaggatctatttgattccttctgaagggaaggagggggagtactgagattagtgttggcatggggcttaccataccaataaatttgtatctttatttctatcatttgtaaagaattaatcatggaatgcttggaagtattttatttcattgtataagttctctcaaatgcctttctgtcttaacaaaaataaaactacctgatttggaaacctaacgtctatgtcattgtctttcttctttctgcaatgatccttaagatcacaaaagcacttcttccatcgatgatggagagaaatcatggccacatcgtcacagtggcttcagtgtgcggccacgaagggattccttacctcatcccatattggtaagtatcacatgccagccatgttatatatttttatactttgaagggagcattacacttcaaattgttaccactggagagtcctggttcttggcatcttgaacaaagaattggacaaaactcaccaacaaagccaggaaagaatgaagcaacaaaagcagagatttattgaaaatgaaagtacgctttacagggtgggagtgggcccaagcacaggggctcaagagccaattacagaattttctggggtttaaataccccctagaggtttccactggttacttggtgtacgccctatgtaaatgaagaggatgaattaaagttacagagtcgtttactcagtgtacaccatatgtaaatggagaggatatttcctgtcatagctggagtgtttccatttgatttagttctaggaagtcagcatgaatcggccttatgttccctgcctccagaccctgttctcctgcctcaagattacaatgctgagagcagagtgatttggatttacagaatttaaatttatagtagtttagaatgattttttaaatgactttttctaaaacaatgaaaccaggttgtaattatatttaagatatttttagatttctgcaaactcctctgtagaacaatgagagaaaacagtaatgccaagcatgtttccattgtttcctggaataagaaacagaaaccccacagactgagaagcaaaacctacagaagctaaaatgaacacatgtctatgtcatggccttggtgcccaagataagacaatcagagtggtccctggatcaaaacattttacagtgtgcttgtgccatgaaagtgtgtgtgtgtgtgtgtgtgtgtgtgtgagagagagagagagagagaaaacgactctacctgactaaaagttgcagataccacactccatgcaccaccaaagacataaagggaaggaggtgagaggcgttaaggatgtactgctgtatttgccaaatatcctttcctgtaaactcttctccagatcctcataataaaattaagaggccaaagtggcaaccattgtcaagagaaaaactatcaaccattgtcaagagaataactcagttattgagagagagaggagaaatgagcagagtcctacagaagtctgtcaacacagataccagttttgtagaatttctaaatgtatttttcctgattcatatttttcaaaataaaagcagcaataaaaactgattagaaaacagtttgaagattcaatggaaaaaccttacatgtaggatggaaaactgaacattaagccaatcaatagagttatttttgttcttttgttatcattgttgtttaagaaatgagatacgttcacaattctgcttaatcatgtaagaaaatgaaaatgaattgccatttatactctcagaaaaatcacaagtggctgatttttggcttccacttgttcttaagccaaatgataccgccttctcacagaaagctgaggattggtttcactctcccttagctaacaatgcttaataattctcttacagttccagcaaatttgccgctgttggctttcacagaggtctgacatcagaacttcaggccttgggaaaaactggtatcaaaacctcatgtctctgcccagtttttgtgaatactgggttcaccaaaaatccaagcacaaggtaaggtcaaaatcaagttagaatgggtatgtggtatgataaattgatatgaaaactaatgagaaatgtttaggcaggccaactaatagaagaaaatgaagaaggaaaaataatttttcttattattattattatcttgaaattaaaggaataaagggggaaaacacattagggactagcaggaatgatcagccaccgatgaactgggatatttatttgtgtccgggagaaagcacatacatttgatcaccgttaccaccctgtctttaaaatgcaaatgttccaaggaccagcaaataaattgagtatctagctccttagtcaaggtgaatttctgcaagaactcttgtctctggtgagacaggatttgagaccacaagagaagaaaaattagtcctgaaaggagaagaaaaaagcaggaaggtgtggataagaacccgaaaattaagccatctgcttaacaaatttttctaatcctagtatatattctgctgcaggttaacaaaatatactaagcttaatgattcgaaaccaattttttactggaagggaattaatcctaaatatattcattcaaaagaactaaacaattctctgttgagtgccgcctcatttgaggatactgactcttacagcctgagttagctatgtggtctctgcagctggaatcactccctgccactggagtccttcatggtgttagaccataggtactgttgactaaagaaaaaaaaaagtttttgtttttatttttgttttttttgagacagagtctcactctgtcacccaggctggagtacagtggcgcgatctcagctcaccgcaacctccgcctttctgggttcaagcaattctccttcctcagcctcctgagtatttggattacaggcgcccaccaccacgcctggctaatttttgtatttttagtagagacggggtttcaccatgttggccaggctggtctcaaactcctgacctcaggtgtcctacctgccttggcctcctaaaatgctgggattacaggagtgagccaccatgcccggccaaaaaaataagtttttaaagaattaaaggtcatcctggctaacacagtgaaaccccgtctctactaaaaaacacaaaaaaattagccgggcgtggtggcgggcgcctgtagtcccagctgcgcgggaggctgaggcaggagaatggcgtgaacccgggaggcggagcttgcagtgagccgagatcgcgccactgcactccagcctgggcgacagagcgagactccgtctcaaaaaaaaaaaaaaaaaaaaaaaaaaaaagaattaaaggtgttaattttatttagaagccttactgaagactacagtcggaggcctatagcctgagagcagccctttagagaggttcagttgaactgttctgatagtgggggccatgtgctctatcctgtattgtcttcaaagcatctttccagagagctgcacattgtcacagagtcagggactttgtgaaattatgctgacaaccagaagtgagtaaacgtggcttcttacatttgctacgttgtctcacagtacttaataagtatgcaatatgtaagtaaatactatagtactattgcaactcctgattgttttcttagacaaggaattgggcccaataaaaaccctcttggtaggcattcaggcttcgtgtaccatgagctttcctaagggtatcctgccactcttggggaaggcatgatagatgaggggagtaaggataatggaactctgggtacagggttcctgggggctaacttagaggtagacacaggcaatgctaaatatttgggattgattttatagaggttgctagattgtgaatttccttagtaagggctaaggcattgatatgtaatgtcacacttggctccgaggctgggttgttggatccatgtagatgaaatcagggagagaaagggcagaacggagtaatttagaaatgtattgatttgtattactctctgttggcttgctattcaaggcagtggagaactcaatcacataataatctgcagcaaaccacagatcatcccagggaatgaagttttaacattcgctggctccctaactcctcacccagcctttacattcactggctgttcagtccatgcctggacatcttaatttgaatacaacattttaaatccatttttctgtcatcatcttgcactaacagacaattctacactaagcctatgtttatgaatatttctcaagagtacatgtacacagccttcagtataaggaaaactggaagtatgacatacctccagttgtcatactccttgggcccctcttaaattctcattaaactgcaggataggcaagtcagaggtgaatctcaaatacgaaattcttaccggaaaggggttccaatccagaccccaagagagggttcttagatttctcgcaagaaataattcggggcaaggccacagtgcaaagcaaaagcaagtttattaggaaagtaaaggagtagagaacagctactccatggagaagaatggcttgagctgctccaccaagggtatttagagttacttcttgattatatgctaaacaaggggtggattattcatgagttttccgggaaaagggtgagcaattcccagaactgagatttcctcccctttttaggccatatagggtaacttcctgccattgccatggtatttgtaaactgtcatagtgctggtggaagtgtctcttagcttgctaatgtattatagttagcttataatgagcagtgaggacaaccagaggtcactttcatcaccatcttggttttggtgggttttggccggcttctttactgcaccctattttatcaacaaggtctttatgacctgaatcttgtgccaacctcctatctcatcctgtgacaaagaatgccttaacttcctgggaatgcagcccagtaggtgtcagccttattttacccagaccctattcaagatggagttgctctgatttaaacgcctctgacaaaatgacgacctcaaaacaatccagctttatggaatacctccacaagaaagaaagtatacttagctatagaattttctccttgcatccaacaggctttgagatgtcagatgtttccttcctgtcccatgattaatcctagccattcctctttcttgtctggctccactactccttaccatctaatgcctcgccaccattttgatattttgactaagtgagctatgaaacacacctactggatatgaaagtataagtttctgataacaaaacatcaacatgggatgtggaggaagtgggtagggtggcattaatgcagcaaatcctggaatattttaaatcttcattctaaatttagtaaaaatataggataattttcctgccatcatttacttataaaattaaaattttagaaaataaaaataatattttcctctttttaatcacagattatggcctgtattggagacagatgaagtcgtaagaagtctgatagatggaatacttaccaataagaaaatgatttttgttccatcgtatatcaatatctttctgagactacagaagtaagtacagcacagaacacccaaatactaaaacaccaatagagcttttttttttgctttttttttttttagacagagtctcactctgtcaccctggctggattgcggtggttgcagtggcatgatcttggctcactgcaacctccgcctcctgggttcaagcaattctcatgcctcagacccccaagtaactgggattataggtgtgtgctgccacactacacccagctaatttttgtattttttgatagagacaggtttccccatgttggccaggctggactcgaactcctgacctcaagttatcctcctgtctcggcctcccaaagtgctgggattacagtcatgagccaccatgcctggcccaatagagctattattatggagcatctttcagttgtgaaaattggcatggaaactctccatccctggggagaacagttatttcctctgttattttcctacccagtctataaaaagagagtgattcattttctctaccaaatctactgtctctgcccaaactttgctgaagactattctaactaaaggaaacacagtttaaaaagaatgcaatatagtgaagtagttaataataaagactccatttttaaaagtctgctggaagtttggttgggattgcactgaatctatagagcaattggggagtattgacatatcaacaatattgagttttctaatccaagaacataatatctatttttaaaatcttcttcaaaatctttaaatctttaaattgtattttgtagtttttggtgtttaagtcttgcacatattttgtcagatttattccaaagtatttcacgggttcttttttttttttttttttttttttttgagacagagtttcacccttgttgcccaggctggagtgcagtggcgtgatcttggctcactgcagcttctgcctcctggcttcaagtgattctcctgcctcagcctcccaagtagctgggattacaggcacctgccccctcgcccaactaactttttgtgtttgtagtagagacagggtttcaccatgttggccaggctggtctcgaactcctgacctcatgtgatccacctgcctcagcctcccaaagtgctgggattacaggcatgagccatcatgcccagccctatttgacggtttttgacgctaatgcaagtggcattttaaaaaattttatatttcccattgtttgttgtcagtatatattggatttttgtaatttgatctcatattttgcagtcttgctaaattgctaaacctctttttgctaaactcgataagcttttttttttttggtagattcctgggcctctaattttctttatgggaaagtttttaattacaaatttaatttctttaatagctacatggctattcaatttacttattaattcttggtaatgtgtgtctttcaaggaatttgtccatttcatctaagttgtagaatttctttggcataaatttgtacataacattcccttattatccttttaatgtctttagaatgtcttatttatttatttatttatttttattatatttttttgagacagagtctcgctctgttgcccaggctggagtgcagtggcacaatcttggctcactgcaagctccgccttctgggttcatgccattctcctgcctcagcctccctagttgctgggactacaggcgcctgcaaccatgcccagcttattttttttttttttttttttttttttttttttttttttttttttttagtagagacggggtttcaccctgttagccaggatggtctcgatctcctgacctggtgatccgcccgcctcagcctcccaaagtgctgggattacaggcgtgagccaccaagcccagcctatttatttatttagtagagacagtctcactttgctgcccaggcaacaaaggttttgaatgcctggcctcaagcagtcctcctgccttggcctcccaaagtgctgggattacaggcatgagccactgcacctggccaaatgaatatgctgataatatcttctttataaggatgacataagaataaaataatgtaatacaaacaaagcccctgtcactgaaaatgtatagacttcaaatgttaaagtcttagagaacagaatttatatgaaatagcaacagcaacaatttcccagaggaaatactctctcagctttcttctgaggagcagtttctaaattgaaattgtatcagtgagaagataactatactaacttcataagccttgggcctttttgaaacaaatccatataaactatgaacaaacttgaaatagaacaatttgagaacagggtacaaactgcattggtgtatcaatttcagtatttggttttagcttaaatagactgacttgagataacataaggagaaccttgacccccaagcaacatcatctcgcgagttgactaggccgggtgtggtgtctcacgcctgtaattccagcactttgggaggccacagcaggcagatcacttgaggtcaggcattcgagaccagcctggccaacatggtgaaacctcagctctactaaagatacgaaaattagcaggcatagtggcctgcacctgtaataccaggcactcgcaggagaatcccttgaacccggaaggcggagattgcagtaaaccatgattgtgccactgcactccagcctgggcaacaggagactctgtctcggaaaaataaattttttaaaaaaatgaaaaaaaataaaagttgactaaattagtgtcttggtactaagcactgtaggaagtgagtttcatggaaccccaactctcttggggcccaaagcaagtcatattaatattgaaaattacatgcatatacatgcatatgaccaaggtgataaaaacaattattctgcctgagttggagaatagtatcccagtaaaataaacaagagtctcaaagtcttttgtatcctttgaagctgtcatggtggtttgtaactaggcaacaggtatatattgttaatcttctttgcatttaattccttttatagagagacacaattttacgagcagatgcaattactagcatgaaggtttctttgtgagggtagttaaaaggcccacatgagctctcttcttatccttgtccttctttcagccagatcttccctgcccctttgctcattccatctttcacccacctacccccaaaacaaggaagtaaatcttgcattagtcaacaataccaaagtgattttcaatatgactttctctgcagaatgttattatttctgcctctttacattcacatactgtcttcctttttttttttttttttttttttttttttagattgggtctcactctgttgcccaggctggagtgcagtggcttgatctcagctcactgtaacctccacctcctgagttcaagcaattctcctgcctcagcctcctgagtagctgggattacaggcatgtgccaccacacctggctagtttttttgtatttttagtagagacagggtttcaccatgttggtcaagctggtctcgaactcctgacctcatgatctgaccacctgtgcctctcaaagtgctgggattacaggcgtgagccaccgggccagccactctcttcctttcagttgcctactcatctcttatgcattcctggacatcagttgtccttttgaagctttcctccactatcccagcccatgtgaatcctccttccagttatagcccttaattctagatggctgatatttttcaataattgttttaagatgaccattttagcctatcagctaaacaatatcaaagacaatagctatttttcaagtactttagtttaccttattatagagtgcataatagatattcagtaaatagtaaaggagaggtgaaggcttgcatagaatggattctggtggtgtctcttggtgagcttttagcatcaagattaatcagcagtttcagcaatgagctcagaccttcagttttagatctttactcatatcagataagagagtgagaagagtggtatgtatcagtgctttatttatatttgcatccaatttgaactatgaatattacaaaggtgcacacataggttcagacagattgatttaaaatgaccaaagatgacctgtcgtaagcaacctgggtatcttaagatgcactccttggagagggaatgttcctaaaaacattttcagagggacgaactgtatgaaattcagtaaaacataaatcatgaggaaaactgattactctctttttgacatgaaatgagagttttaatgcatggttacgattattaacgtactccgctgcaagacgttaataaagttactgttttgcaggctagaatgtcttgatgctgtaatcagaacacactttttcccctttcttccagcttcaaatgcagattcataattgggctgacttctaataactgcaatgttttctgccttgggcttgcagcagaagcctgacaaaatagtgtttgtttaggcaataatttatttatttatttattgagatggagtttcattcttgtcgcccaggctggagtgcaatggcgtgatctcggctcactgcaacctctgtgttcaggcaataatttagactttaccttacttgtgattactatagcaattactatagccacaaggcataattttactgtctcatttcaattttatgaatttgaatgtttttacacttttcctaatgaagtccactatgaagttatgtcaaaaaaaaaaaagaaaaagaaagatgcacacgtaaaagagaggtggttgcaagagaagaaaagaacggaggaaagttaaacgcaaaccagataactctcagcgtattctaaatgaccaaaaacagaactctgttgtcaaagattttaaatggaaaatttttcaatttttttttcttttttgtacaggtttcttcctgaacgcgcctcagcgattttaaatcgtatgcagaatattcaatttgaagcagtggttggccacaaaatcaaaatgaaatgaataaataagctccagccagagatgtatgcatgataatgatatgaatagtttcgaatcaatgctgcaaagctttatttcacattttttcagtcctgataatattaaaaacattggtttggcactagcagcagtcaaacgaacaagattaattacctgtcttcctgtttctcaagaatatttacgtagtttttcataggtctgtttttcctttcatgcctcttaaaaacttctgtgcttacataaacatacttaaaaggttttctttaagatattttatttttccatttaaaggtggacaaaagctacctccctaaaagtaaatacaaagagaacttatttacacagggaaggtttaagactgttcaagtagcattccaatctgtagccatgccacagaatatcaacaagaacacagaatgagtgcacagctaagagatcaagtttcagcaggcagctttatctcaacctggacatattttaagattcagcatttgaaagatttccctagcctcttcctttttcattagcccaaaacggtgcaactctattctggactttattacttgattctgtcttctgtataactctgaagtccaccaaaagtggaccctctatatttcctccctttttatagtcttataagatacattatgaaaggtgaccgactctattttaaatctcagaattttaagttctagccccatgataacctttttctttgtaatttatgctttcatatatccttggtcccagagatgtttagacaattttaggctcaaaaattaaagctaacacaggaaaaggaactgtactggctattacataagaaacaatggacccaagagaagaaaaggaagaaagaaaggttttttggtttttgttttgttttgttttgttttttgtttttttgagatggagtctcactctttcgcccaggctggagtgcagtggtatgatctcagctcactgcaagctccacctcccgggttcacgccattctcctgcctcagcctcctgagtagctgggactacaggcgcccgccaccacacccggctaattttttgtattttttgtagagacggggtttcaccatgttagccaagatggtctcgatctcctgacctcgtgatccacctgcctcggcctcccaaagtgctgggattacgggtgtgagccaccgtgcccagcctttttttttttaatagaaaaaataatccgactcccactacatcaagactaatcttgttttgtgtgtttttcacatgtattatagaatgcttttgcatggactatcctcttgtttttattaaaaacaaatgatttttttaaaagtcacaaaaacaattcactaaaaataaatatgtcattgtgctttaaaaaaataacctcttgtagttataaaataaaacgtttgacttctaaactctgtctctatgagtgtccttcaagaaccaaggatgtggatggtaacagctacatctggcagttattaaatgaatccaggggttttctcaactctggtttctttgacagcaggagtgctggtttatcaactggaacttactgacccctttctatgtgtgagattaagcacagtgctattgtttctaattttttttcttagtcaccggcaataatttttttcataacattcttttaatttcttgccttataatcaagaaatttatgagtaaaatgtattatttttaaagtatggttacaaaaattcaaaagagaaacatggaaagtaaaaaatagaagcttacccccagcaatcccatttcccagaggtcacactgtcaatgcacaatcttccagtcttttactgatgcatgttcatgacaaatacattatattcttattgcatgggtcgtatcagtagtttcataccatacattatgttctgtaacttgctcttttagcttaccaacttatcacaaacagctgtttgtttcagtatagagaattcaactttttttcatgagtacacagtactaaaatggtactctaaccattcccttttgataggcacttaggatgtttccagtatttcttagttcatctatttaaatattaatttaacaaatactgagtgccctcaaagttctaggcccagggaaacatatatgaataaggcaaactccttgtcttaacagagctcacattctagtaggtgggacaaacaataaagggactgcaaatatgagagagagcatttaaagtagtagagtcagggaagagcacgctgagaaagaacattttgcggacgaactattaccatacacaggcaactaaaaaatattttatgatatacatattgacaaaaatagaaacctcttaaattccagtgttaagttcagagcagaaaacttcttattttaattccattttggttttaatcttttatgaatgaagctcagagaaatgtgcgagcaaaatattcatctctctttgtccatttttcttgcttattttgagtgtagtcctcctccttaaaagttccacctgcagccaggcgtggtgactcatgcttgtaatcctagcactttgggaggccaaggggggcagatcacctgaggtcaggggttcgagaccagcctggccaacaaggcgaaaccctgtctctactaaatatacaaaatttagctgggcatggtggtacatgcctgtaatcccagctactcaggaggctgaggcaggagaatcacttgaacctgggaggcggaggttgcagtgagctaagatcacgccaccgcactccagcctgggcaacagagtgagactccgtctcaaaaaaataaaaagctccacctgagcttccaaatgttttcctatgacaatcttcatctataattctctctaagagccctctctttcaccaaaatcccagttccaagggctactgctaggatgtgcagatcaccagacaaatatttttttgcagggcttctatctatataaacacttttattaaaaatgctttataaaatttataggtccatgtgcatgcagtatagtgattttttgataaagatttagaataataggaagatttgtgtatttattgtccgagcagtacatgtaaagattcttctcggcatcctggtactatctctttggtccaggaatcatttcttttttatcaaatgagccattcctagctaatttcatatcttttaccacaagaaagggtagcaatgctgttattattcataatgccatggctctttgtaatatgtttgtaataaaataatatgaatcttcacccctttccaataccctgctaccatttatttaatcttagctacattatgccttttgacattgcatcatccattgtgctacccatgaatactgggtatcactcagagacaatcactcaaagattgttactggtacaacacagttcaatatagtacaattgttactggtacaatgtttgatgataatcacaaattcaagtcttacccagggtatatatacgagaaaacatgaatgattcgttgtttattgctcattttaaatttatcatttagaatgttatagcatcacatagaacaacacatctttcaactgtgtcttgtcttgaactttttaggccatcatcattacatttctagaattgatctctgccactcctgaccgtaccctacctcccacacaccaccagcagcagagaggggattgtggacagaacaaaatgaacagccccatttgcacaaggaatgtctgtccctcctctaggagagcttaacattgaccagggagaagagaacacagcatcatcacatcagtcagaaaggcccactgttgtgaagaagcaatagtcttaaaagccctcagaagagataagtgcagccaccccccaacccccagccaaaaggactgcctgacccatggcatagaacctgcagaggggataggatgattttcctgaatgccattggcaagcggggtaaggacatctgatgtcaccctgcagcccttggatgttatatagcagaagtggcatcatactcagaacaaactgcgagtggatgcatgggtcaacacatgcggcttgggcagtggaccttagatagcttacaaccctaaattagatctatgcccaatgtgagtgagaattatccaaaatcagcatgtcagcatcattctggcagccaaatttcatgtaatcctgcaaaagaaattctttgccaaccagaagtagcagtct

SEQ ID NO: 3 - DNA, 2398 bp, Homo sapiens
agacagtacctcctccctaggactacacaaggactgaaccagaaggaagaggacagagcaaagccatgaacatcatcctagaaatccttctgcttctgatcaccatcatctactcctacttggagtcgttggtgaagtttttcattcctcagaggagaaaatctgtggctggggagattgttctcattactggagctgggcatggaataggcaggcagactacttatgaatttgcaaaacgacagagcatattggttctgtgggatattaataagcgcggtgtggaggaaactgcagctgagtgccgaaaactaggcgtcactgcgcatgcgtatgtggtagactgcagcaacagagaagagatctatcgctctctaaatcaggtgaagaaagaagtgggtgatgtaacaatcgtggtgaataatgctgggacagtatatccagccgatcttctcagcaccaaggatgaagagattaccaagacatttgaggtcaacatcctaggacatttttggatcacaaaagcacttcttccatcgatgatggagagaaatcatggccacatcgtcacagtggcttcagtgtgcggccacgaagggattccttacctcatcccatattgttccagcaaatttgccgctgttggctttcacagaggtctgacatcagaacttcaggccttgggaaaaactggtatcaaaacctcatgtctctgcccagtttttgtgaatactgggttcaccaaaaatccaagcacaagattatggcctgtattggagacagatgaagtcgtaagaagtctgatagatggaatacttaccaataagaaaatgatttttgttccatcgtatatcaatatctttctgagactacagaaggtttcttcctgaacgcgcctcagcgattttaaatcgtatgcagaatattcaatttgaagcagtggttggccacaaaatcaaaatgaaatgaataaataagctccagccagagatgtatgcatgataatgatatgaatagtttcgaatcaatgctgcaaagctttatttcacattttttcagtcctgataatattaaaaacattggtttggcactagcagcagtcaaacgaacaagattaattacctgtcttcctgtttctcaagaatatttacgtagtttttcataggtctgtttttcctttcatgcctcttaaaaacttctgtgcttacataaacatacttaaaaggttttctttaagatattttatttttccatttaaaggtggacaaaagctacctccctaaaagtaaatacaaagagaacttatttacacagggaaggtttaagactgttcaagtagcattccaatctgtagccatgccacagaatatcaacaagaacacagaatgagtgcacagctaagagatcaagtttcagcaggcagctttatctcaacctggacatattttaagattcagcatttgaaagatttccctagcctcttcctttttcattagcccaaaacggtgcaactctattctggactttattacttgattctgtcttctgtataactctgaagtccaccaaaagtggaccctctatatttcctccctttttatagtcttataagatacattatgaaaggtgaccgactctattttaaatctcagaattttaagttctagccccatgataacctttttctttgtaatttatgctttcatatatccttggtcccagagatgtttagacaattttaggctcaaaaattaaagctaacacaggaaaaggaactgtactggctattacataagaaacaatggacccaagagaagaaaaggaagaaagaaaggttttttggtttttgttttgttttgttttgttttttgtttttttgagatggagtctcactctttcgcccaggctggagtgcagtggtatgatctcagctcactgcaagctccacctcccgggttcacgccattctcctgcctcagcctcctgagtagctgggactacaggcgcccgccaccacacccggctaattttttgtattttttgtagagacggggtttcaccatgttagccaagatggtctcgatctcctgacctcgtgatccacctgcctcggcctcccaaagtgctgggattacgggtgtgagccaccgtgcccagcctttttttttttaatagaaaaaataatccgactcccactacatcaagactaatcttgttttgtgtgtttttcacatgtattatagaatgcttttgcatggactatcctcttgtttttattaaaaacaaatgatttttttaaaagtcacaaaaacaattcactaaaaataaatatgtcattgtgctttaaaaaaataacctcttgtagttataaaataaaacgtttgacttctaaactctg

SEQ ID NO: 4 - DNA, 2289 bp, Homo sapiens
agacagtacctcctccctaggactacacaaggactgaaccagaaggaagaggacagagcaaagccatgaacatcatcctagaaatccttctgcttctgatcaccatcatctactcctacttggagtcgttggtgaagtttttcattcctcagaggagaaaatctgtggctggggagattgttctcattactggagctgggcatggaataggcaggcagactacttatgaatttgcaaaacgacagagcatattggttctgtgggatattaataaggtgaagaaagaagtgggtgatgtaacaatcgtggtgaataatgctgggacagtatatccagccgatcttctcagcaccaaggatgaagagattaccaagacatttgaggtcaacatcctaggacatttttggatcacaaaagcacttcttccatcgatgatggagagaaatcatggccacatcgtcacagtggcttcagtgtgcggccacgaagggattccttacctcatcccatattgttccagcaaatttgccgctgttggctttcacagaggtctgacatcagaacttcaggccttgggaaaaactggtatcaaaacctcatgtctctgcccagtttttgtgaatactgggttcaccaaaaatccaagcacaagattatggcctgtattggagacagatgaagtcgtaagaagtctgatagatggaatacttaccaataagaaaatgatttttgttccatcgtatatcaatatctttctgagactacagaagtttcttcctgaacgcgcctcagcgattttaaatcgtatgcagaatattcaatttgaagcagtggttggccacaaaatcaaaatgaaatgaataaataagctccagccagagatgtatgcatgataatgatatgaatagtttcgaatcaatgctgcaaagctttatttcacattttttcagtcctgataatattaaaaacattggtttggcactagcagcagtcaaacgaacaagattaattacctgtcttcctgtttctcaagaatatttacgtagtttttcataggtctgtttttcctttcatgcctcttaaaaacttctgtgcttacataaacatacttaaaaggttttctttaagatattttatttttccatttaaaggtggacaaaagctacctccctaaaagtaaatacaaagagaacttatttacacagggaaggtttaagactgttcaagtagcattccaatctgtagccatgccacagaatatcaacaagaacacagaatgagtgcacagctaagagatcaagtttcagcaggcagctttatctcaacctggacatattttaagattcagcatttgaaagatttccctagcctcttcctttttcattagcccaaaacggtgcaactctattctggactttattacttgattctgtcttctgtataactctgaagtccaccaaaagtggaccctctatatttcctccctttttatagtcttataagatacattatgaaaggtgaccgactctattttaaatctcagaattttaagttctagccccatgataacctttttctttgtaatttatgctttcatatatccttggtcccagagatgtttagacaattttaggctcaaaaattaaagctaacacaggaaaaggaactgtactggctattacataagaaacaatggacccaagagaagaaaaggaagaaagaaaggttttttggtttttgttttgttttgttttgttttttgtttttttgagatggagtctcactctttcgcccaggctggagtgcagtggtatgatctcagctcactgcaagctccacctcccgggttcacgccattctcctgcctcagcctcctgagtagctgggactacaggcgcccgccaccacacccggctaattttttgtattttttgtagagacggggtttcaccatgttagccaagatggtctcgatctcctgacctcgtgatccacctgcctcggcctcccaaagtgctgggattacgggtgtgagccaccgtgcccagcctttttttttttaatagaaaaaataatccgactcccactacatcaagactaatcttgttttgtgtgtttttcacatgtattatagaatgcttttgcatggactatcctcttgtttttattaaaaacaaatgatttttttaaaagtcacaaaaacaattcactaaaaataaatatgtcattgtgctttaaaaaaataacctcttgtagttataaaataaaacgtttgacttctaaactctg

SEQ ID NO: 5 - DNA, 25 bp, Artificial sequence
  Primer
agactacagaagtttcttcctgaac

SEQ ID NO: 6 - DNA, 22 bp, Artificial sequence
  Primer
catctctggctggagcttattt

SEQ ID NO: 7 - DNA, 24 bp, Artificial sequence
  Probe
tttgaagcagtggttggccacaaa

SEQ ID NO: 8 - DNA, 16 bp, Artificial sequence
  Synthetic oligonucleotide
ggaggaggtactgtct

SEQ ID NO: 9 - DNA, 16 bp, Artificial sequence
  Synthetic oligonucleotide
gatgttcatggctttg

SEQ ID NO: 10 - DNA, 16 bp, Artificial sequence
  Synthetic oligonucleotide
actccaagtaggagta

SEQ ID NO: 11 - DNA, 16 bp, Artificial sequence
  Synthetic oligonucleotide
gctccagtaatgagaa

SEQ ID NO: 12 - DNA, 16 bp, Artificial sequence
  Synthetic oligonucleotide
atcccacagaaccaat

SEQ ID NO: 13 - DNA, 16 bp, Artificial sequence
  Synthetic oligonucleotide
tagttttcggcactca

SEQ ID NO: 14 - DNA, 16 bp, Artificial sequence
  Synthetic oligonucleotide
agagcgatagatctct

SEQ ID NO: 15 - DNA, 16 bp, Artificial sequence
  Synthetic oligonucleotide
ccacgattgttacatc

SEQ ID NO: 16 - DNA, 16 bp, Artificial sequence
  Synthetic oligonucleotide
cggctggatatactgt

SEQ ID NO: 17 - DNA, 16 bp, Artificial sequence
  Synthetic oligonucleotide
aaatgtcttggtaatc

SEQ ID NO: 18 - DNA, 16 bp, Artificial sequence
  Synthetic oligonucleotide
aagtgcttttgtgatc

SEQ ID NO: 19 - DNA, 16 bp, Artificial sequence
  Synthetic oligonucleotide
ccactgtgacgatgtg

SEQ ID NO: 20 - DNA, 16 bp, Artificial sequence
  Synthetic oligonucleotide
gctggaacaatatggg

SEQ ID NO: 21 - DNA, 16 bp, Artificial sequence
  Synthetic oligonucleotide
cccaaggcctgaagtt

SEQ ID NO: 22 - DNA, 16 bp, Artificial sequence
  Synthetic oligonucleotide
atacaggccataatct

SEQ ID NO: 23 - DNA, 16 bp, Artificial sequence
  Synthetic oligonucleotide
atcagacttcttacga

SEQ ID NO: 24 - DNA, 16 bp, Artificial sequence
  Synthetic oligonucleotide
attgatatacgatgga

SEQ ID NO: 25 - DNA, 16 bp, Artificial sequence
  Synthetic oligonucleotide
ttctgcatacgattta

SEQ ID NO: 26 - DNA, 16 bp, Artificial sequence
  Synthetic oligonucleotide
tctggctggagcttat

SEQ ID NO: 27 - DNA, 16 bp, Artificial sequence
  Synthetic oligonucleotide
cattgattcgaaacta

SEQ ID NO: 28 - DNA, 16 bp, Artificial sequence
  Synthetic oligonucleotide
ttgactgctgctagtg

SEQ ID NO: 29 - DNA, 16 bp, Artificial sequence
  Synthetic oligonucleotide
ggtagcttttgtccac

SEQ ID NO: 30 - DNA, 16 bp, Artificial sequence
  Synthetic oligonucleotide
cagtcttaaaccttcc

SEQ ID NO: 31 - DNA, 16 bp, Artificial sequence
  Synthetic oligonucleotide
tggctacagattggaa

SEQ ID NO: 32 - DNA, 16 bp, Artificial sequence
  Synthetic oligonucleotide
ttagctgtgcactcat

SEQ ID NO: 33 - DNA, 16 bp, Artificial sequence
  Synthetic oligonucleotide
ccaggttgagataaag

SEQ ID NO: 34 - DNA, 16 bp, Artificial sequence
  Synthetic oligonucleotide
agagttgcaccgtttt

SEQ ID NO: 35 - DNA, 16 bp, Artificial sequence
  Synthetic oligonucleotide
cacttttggtggactt

SEQ ID NO: 36 - DNA, 16 bp, Artificial sequence
  Synthetic oligonucleotide
cggtcacctttcataa

SEQ ID NO: 37 - DNA, 16 bp, Artificial sequence
  Synthetic oligonucleotide
atctctgggaccaagg

SEQ ID NO: 38 - DNA, 16 bp, Artificial sequence
  Synthetic oligonucleotide
gtacagttccttttcc

SEQ ID NO: 39 - DNA, 16 bp, Artificial sequence
  Synthetic oligonucleotide
atagccagtacagttc

SEQ ID NO: 40 - DNA, 16 bp, Artificial sequence
  Synthetic oligonucleotide
ggagtcggattatttt

SEQ ID NO: 41 - DNA, 16 bp, Artificial sequence
  Synthetic oligonucleotide
gtccatgcaaaagcat

SEQ ID NO: 42 - DNA, 16 bp, Artificial sequence
  Synthetic oligonucleotide
aatacatatcttactc

SEQ ID NO: 43 - DNA, 16 bp, Artificial sequence
  Synthetic oligonucleotide
gtcataaaaatcgctg

SEQ ID NO: 44 - DNA, 16 bp, Artificial sequence
  Synthetic oligonucleotide
gaaaagcctgactcac

SEQ ID NO: 45 - DNA, 16 bp, Artificial sequence
  Synthetic oligonucleotide
catcaagcccttttca

SEQ ID NO: 46 - DNA, 16 bp, Artificial sequence
  Synthetic oligonucleotide
ctaaaggagatctgag

SEQ ID NO: 47 - DNA, 16 bp, Artificial sequence
  Synthetic oligonucleotide
tagcttaaactccaat

SEQ ID NO: 48 - DNA, 16 bp, Artificial sequence
  Synthetic oligonucleotide
ataagttaccagagca

SEQ ID NO: 49 - DNA, 16 bp, Artificial sequence
  Synthetic oligonucleotide
ctcaaagtcagtatcc

SEQ ID NO: 50 - DNA, 16 bp, Artificial sequence
  Synthetic oligonucleotide
ggcaaggatacctgaa

SEQ ID NO: 51 - DNA, 16 bp, Artificial sequence
  Synthetic oligonucleotide
ctcatttatgtaccaa

SEQ ID NO: 52 - DNA, 16 bp, Artificial sequence
  Synthetic oligonucleotide
tatgtaataggcagta

SEQ ID NO: 53 - DNA, 16 bp, Artificial sequence
  Synthetic oligonucleotide
gacaattaacattcgg

SEQ ID NO: 54 - DNA, 16 bp, Artificial sequence
  Synthetic oligonucleotide
ctaggaagtgatccat

SEQ ID NO: 55 - DNA, 16 bp, Artificial sequence
  Synthetic oligonucleotide
ctaataactacatgac

SEQ ID NO: 56 - DNA, 16 bp, Artificial sequence
  Synthetic oligonucleotide
tccaaagatgagagtc

SEQ ID NO: 57 - DNA, 16 bp, Artificial sequence
  Synthetic oligonucleotide
gcaaagatctggccag

SEQ ID NO: 58 - DNA, 16 bp, Artificial sequence
  Synthetic oligonucleotide
tccaaaagtgtcctcg

SEQ ID NO: 59 - DNA, 16 bp, Artificial sequence
  Synthetic oligonucleotide
ctacactaatattgag

SEQ ID NO: 60 - DNA, 16 bp, Artificial sequence
  Synthetic oligonucleotide
agtgaacatacattgt

SEQ ID NO: 61 - DNA, 16 bp, Artificial sequence
  Synthetic oligonucleotide
attaagacagttgagt

SEQ ID NO: 62 - DNA, 16 bp, Artificial sequence
  Synthetic oligonucleotide
atttattggtatggta

SEQ ID NO: 63 - DNA, 16 bp, Artificial sequence
  Synthetic oligonucleotide
ctgtaattggctcttg

SEQ ID NO: 64 - DNA, 16 bp, Artificial sequence
  Synthetic oligonucleotide
tcttatcttgggcacc

SEQ ID NO: 65 - DNA, 16 bp, Artificial sequence
  Synthetic oligonucleotide
tccattgaatcttcaa

SEQ ID NO: 66 - DNA, 16 bp, Artificial sequence
  Synthetic oligonucleotide
gaaaccaatcctcagc

SEQ ID NO: 67 - DNA, 16 bp, Artificial sequence
  Synthetic oligonucleotide
tggtaacggtgatcaa

SEQ ID NO: 68 - DNA, 16 bp, Artificial sequence
  Synthetic oligonucleotide
ttaagcagatggctta

SEQ ID NO: 69 - DNA, 16 bp, Artificial sequence
  Synthetic oligonucleotide
acagagaattgtttag

SEQ ID NO: 70 - DNA, 16 bp, Artificial sequence
  Synthetic oligonucleotide
agacaatacaggatag

SEQ ID NO: 71 - DNA, 16 bp, Artificial sequence
  Synthetic oligonucleotide
ccttaggaaagctcat

SEQ ID NO: 72 - DNA, 16 bp, Artificial sequence
  Synthetic oligonucleotide
atcaatgccttagccc

SEQ ID NO: 73 - DNA, 16 bp, Artificial sequence
  Synthetic oligonucleotide
tattatgtgattgagt

SEQ ID NO: 74 - DNA, 16 bp, Artificial sequence
  Synthetic oligonucleotide
attcataaacataggc

SEQ ID NO: 75 - DNA, 16 bp, Artificial sequence
  Synthetic oligonucleotide
actctaaatacccttg

SEQ ID NO: 76 - DNA, 16 bp, Artificial sequence
  Synthetic oligonucleotide
ggattaatcatgggac

SEQ ID NO: 77 - DNA, 16 bp, Artificial sequence
  Synthetic oligonucleotide
tcatagctcacttagt

SEQ ID NO: 78 - DNA, 16 bp, Artificial sequence
  Synthetic oligonucleotide
tttagtatttgggtgt

SEQ ID NO: 79 - DNA, 16 bp, Artificial sequence
  Synthetic oligonucleotide
caattgctctatagat

SEQ ID NO: 80 - DNA, 16 bp, Artificial sequence
  Synthetic oligonucleotide
agcatattcatttggc

SEQ ID NO: 81 - DNA, 16 bp, Artificial sequence
  Synthetic oligonucleotide
agtttatatggatttg

SEQ ID NO: 82 - DNA, 16 bp, Artificial sequence
  Synthetic oligonucleotide
ctagtaattgcatctg

SEQ ID NO: 83 - DNA, 16 bp, Artificial sequence
  Synthetic oligonucleotide
ctgggatagtggagga

SEQ ID NO: 84 - DNA, 16 bp, Artificial sequence
  Synthetic oligonucleotide
gctaaaagctcaccaa

SEQ ID NO: 85 - DNA, 16 bp, Artificial sequence
  Synthetic oligonucleotide
gatacccaggttgctt

SEQ ID NO: 86 - DNA, 16 bp, Artificial sequence
  Synthetic oligonucleotide
attagaagtcagccca

SEQ ID NO: 87 - DNA, 16 bp, Artificial sequence
  Synthetic oligonucleotide
gctatagtaattgcta

SEQ ID NO: 88 - DNA, 16 bp, Artificial sequence
  Synthetic oligonucleotide
gggaggaggtactgtc

SEQ ID NO: 89 - DNA, 16 bp, Artificial sequence
  Synthetic oligonucleotide
atgatgttcatggctt

SEQ ID NO: 90 - DNA, 16 bp, Artificial sequence
  Synthetic oligonucleotide
gactccaagtaggagt

SEQ ID NO: 91 - DNA, 16 bp, Artificial sequence
  Synthetic oligonucleotide
agctccagtaatgaga

SEQ ID NO: 92 - DNA, 16 bp, Artificial sequence
  Synthetic oligonucleotide
gcgcttattaatatcc

SEQ ID NO: 93 - DNA, 16 bp, Artificial sequence
  Synthetic oligonucleotide
ctagttttcggcactc

SEQ ID NO: 94 - DNA, 16 bp, Artificial sequence
  Synthetic oligonucleotide
gagagcgatagatctc

SEQ ID NO: 95 - DNA, 16 bp, Artificial sequence
  Synthetic oligonucleotide
accacgattgttacat

SEQ ID NO: 96 - DNA, 16 bp, Artificial sequence
  Synthetic oligonucleotide
tcggctggatatactg

SEQ ID NO: 97 - DNA, 16 bp, Artificial sequence
  Synthetic oligonucleotide
ctcaaatgtcttggta

SEQ ID NO: 98 - DNA, 16 bp, Artificial sequence
  Synthetic oligonucleotide
gaagtgcttttgtgat

SEQ ID NO: 99 - DNA, 16 bp, Artificial sequence
  Synthetic oligonucleotide
gccactgtgacgatgt

SEQ ID NO: 100 - DNA, 16 bp, Artificial sequence
  Synthetic oligonucleotide
tgctggaacaatatgg

SEQ ID NO: 101 - DNA, 16 bp, Artificial sequence
  Synthetic oligonucleotide
tcccaaggcctgaagt

SEQ ID NO: 102 - DNA, 16 bp, Artificial sequence
  Synthetic oligonucleotide
aatacaggccataatc

SEQ ID NO: 103 - DNA, 16 bp, Artificial sequence
  Synthetic oligonucleotide
tatcagacttcttacg

SEQ ID NO: 104 - DNA, 16 bp, Artificial sequence
  Synthetic oligonucleotide
tattgatatacgatgg

SEQ ID NO: 105 - DNA, 16 bp, Artificial sequence
  Synthetic oligonucleotide
attctgcatacgattt

SEQ ID NO: 106 - DNA, 16 bp, Artificial sequence
  Synthetic oligonucleotide
ctctggctggagctta

SEQ ID NO: 107 - DNA, 16 bp, Artificial sequence
  Synthetic oligonucleotide
gcattgattcgaaact

SEQ ID NO: 108 - DNA, 16 bp, Artificial sequence
  Synthetic oligonucleotide
tttgactgctgctagt

SEQ ID NO: 109 - DNA, 16 bp, Artificial sequence
  Synthetic oligonucleotide
aggtagcttttgtcca

SEQ ID NO: 110 - DNA, 16 bp, Artificial sequence
  Synthetic oligonucleotide
acagtcttaaaccttc

SEQ ID NO: 111 - DNA, 16 bp, Artificial sequence
  Synthetic oligonucleotide
atggctacagattgga

SEQ ID NO: 112 - DNA, 16 bp, Artificial sequence
  Synthetic oligonucleotide
cttagctgtgcactca

SEQ ID NO: 113 - DNA, 16 bp, Artificial sequence
  Synthetic oligonucleotide
gtccaggttgagataa

SEQ ID NO: 114 - DNA, 16 bp, Artificial sequence
  Synthetic oligonucleotide
tagagttgcaccgttt

SEQ ID NO: 115 - DNA, 16 bp, Artificial sequence
  Synthetic oligonucleotide
ccacttttggtggact

SEQ ID NO: 116 - DNA, 16 bp, Artificial sequence
  Synthetic oligonucleotide
tcggtcacctttcata

SEQ ID NO: 117 - DNA, 16 bp, Artificial sequence
  Synthetic oligonucleotide
catctctgggaccaag

SEQ ID NO: 118 - DNA, 16 bp, Artificial sequence
  Synthetic oligonucleotide
aatagccagtacagtt

SEQ ID NO: 119 - DNA, 16 bp, Artificial sequence
  Synthetic oligonucleotide
gggagtcggattattt

SEQ ID NO: 120 - DNA, 16 bp, Artificial sequence
  Synthetic oligonucleotide
agtccatgcaaaagca

SEQ ID NO: 121 - DNA, 16 bp, Artificial sequence
  Synthetic oligonucleotide
agtagatggtaagtca

SEQ ID NO: 122 - DNA, 16 bp, Artificial sequence
  Synthetic oligonucleotide
tgtcataaaaatcgct

SEQ ID NO: 123 - DNA, 16 bp, Artificial sequence
  Synthetic oligonucleotide
tactaatgtccaagga

SEQ ID NO: 124 - DNA, 16 bp, Artificial sequence
  Synthetic oligonucleotide
aaggttagatttcatc

SEQ ID NO: 125 - DNA, 16 bp, Artificial sequence
  Synthetic oligonucleotide
cctaaaggagatctga

SEQ ID NO: 126 - DNA, 16 bp, Artificial sequence
  Synthetic oligonucleotide
ctttagcttaaactcc

SEQ ID NO: 127 - DNA, 16 bp, Artificial sequence
  Synthetic oligonucleotide
gatgttaggacccagt

SEQ ID NO: 128 - DNA, 16 bp, Artificial sequence
  Synthetic oligonucleotide
aggcaaggatacctga

SEQ ID NO: 129 - DNA, 16 bp, Artificial sequence
  Synthetic oligonucleotide
ggagatataacattac

SEQ ID NO: 130 - DNA, 16 bp, Artificial sequence
  Synthetic oligonucleotide
ctatgtaataggcagt

SEQ ID NO: 131 - DNA, 16 bp, Artificial sequence
  Synthetic oligonucleotide
agacaattaacattcg

SEQ ID NO: 132 - DNA, 16 bp, Artificial sequence
  Synthetic oligonucleotide
actaggaagtgatcca

SEQ ID NO: 133 - DNA, 16 bp, Artificial sequence
  Synthetic oligonucleotide
cctaataactacatga

SEQ ID NO: 134 - DNA, 16 bp, Artificial sequence
  Synthetic oligonucleotide
atccaaagatgagagt

SEQ ID NO: 135 - DNA, 16 bp, Artificial sequence
  Synthetic oligonucleotide
ggcaaagatctggcca

SEQ ID NO: 136 - DNA, 16 bp, Artificial sequence
  Synthetic oligonucleotide
gtccaaaagtgtcctc

SEQ ID NO: 137 - DNA, 16 bp, Artificial sequence
  Synthetic oligonucleotide
cctagattctacacta

SEQ ID NO: 138 - DNA, 16 bp, Artificial sequence
  Synthetic oligonucleotide
gatagtgaacatacat

SEQ ID NO: 139 - DNA, 16 bp, Artificial sequence
  Synthetic oligonucleotide
gtattaagacagttga

SEQ ID NO: 140 - DNA, 16 bp, Artificial sequence
  Synthetic oligonucleotide
aatttattggtatggt

SEQ ID NO: 141 - DNA, 16 bp, Artificial sequence
  Synthetic oligonucleotide
gtaaacgactctgtaa

SEQ ID NO: 142 - DNA, 16 bp, Artificial sequence
  Synthetic oligonucleotide
gcacaagcacactgta

SEQ ID NO: 143 - DNA, 16 bp, Artificial sequence
  Synthetic oligonucleotide
ctacatgtaaggtttt

SEQ ID NO: 144 - DNA, 16 bp, Artificial sequence
  Synthetic oligonucleotide
tagctaagggagagtg

SEQ ID NO: 145 - DNA, 16 bp, Artificial sequence
  Synthetic oligonucleotide
agacagggtggtaacg

SEQ ID NO: 146 - DNA, 16 bp, Artificial sequence
  Synthetic oligonucleotide
gttaagcagatggctt

SEQ ID NO: 147 - DNA, 16 bp, Artificial sequence
  Synthetic oligonucleotide
ctcaacagagaattgt

SEQ ID NO: 148 - DNA, 16 bp, Artificial sequence
  Synthetic oligonucleotide
gctttgaagacaatac

SEQ ID NO: 149 - DNA, 16 bp, Artificial sequence
  Synthetic oligonucleotide
cccttaggaaagctca

SEQ ID NO: 150 - DNA, 16 bp, Artificial sequence
  Synthetic oligonucleotide
tatcaatgccttagcc

SEQ ID NO: 151 - DNA, 16 bp, Artificial sequence
  Synthetic oligonucleotide
ttattatgtgattgag

SEQ ID NO: 152 - DNA, 16 bp, Artificial sequence
  Synthetic oligonucleotide
actgaaggctgtgtac

SEQ ID NO: 153 - DNA, 16 bp, Artificial sequence
  Synthetic oligonucleotide
aactctaaataccctt

SEQ ID NO: 154 - DNA, 16 bp, Artificial sequence
  Synthetic oligonucleotide
aggattaatcatggga

SEQ ID NO: 155 - DNA, 16 bp, Artificial sequence
  Synthetic oligonucleotide
tttcatagctcactta

SEQ ID NO: 156 - DNA, 16 bp, Artificial sequence
  Synthetic oligonucleotide
ctctattggtgtttta

SEQ ID NO: 157 - DNA, 16 bp, Artificial sequence
  Synthetic oligonucleotide
aatactccccaattgc

SEQ ID NO: 158 - DNA, 16 bp, Artificial sequence
  Synthetic oligonucleotide
agaagatattatcagc

SEQ ID NO: 159 - DNA, 16 bp, Artificial sequence
  Synthetic oligonucleotide
caccaatgcagtttgt

SEQ ID NO: 160 - DNA, 16 bp, Artificial sequence
  Synthetic oligonucleotide
gctagtaattgcatct

SEQ ID NO: 161 - DNA, 16 bp, Artificial sequence
  Synthetic oligonucleotide
gctataactggaagga

SEQ ID NO: 162 - DNA, 16 bp, Artificial sequence
  Synthetic oligonucleotide
tgctaaaagctcacca

SEQ ID NO: 163 - DNA, 16 bp, Artificial sequence
  Synthetic oligonucleotide
ttaagatacccaggtt

SEQ ID NO: 164 - DNA, 16 bp, Artificial sequence
  Synthetic oligonucleotide
tattagaagtcagccc

SEQ ID NO: 165 - DNA, 16 bp, Artificial sequence
  Synthetic oligonucleotide
ggctatagtaattgct

SEQ ID NO: 166 - DNA, 16 bp, Artificial sequence
  Synthetic oligonucleotide
ctagggaggaggtact

SEQ ID NO: 167 - DNA, 16 bp, Artificial sequence
  Synthetic oligonucleotide
gatgatgttcatggct

SEQ ID NO: 168 - DNA, 16 bp, Artificial sequence
  Synthetic oligonucleotide
cgactccaagtaggag

SEQ ID NO: 169 - DNA, 16 bp, Artificial sequence
  Synthetic oligonucleotide
cctgcctattccatgc

SEQ ID NO: 170 - DNA, 16 bp, Artificial sequence
  Synthetic oligonucleotide
cgcgcttattaatatc

SEQ ID NO: 171 - DNA, 16 bp, Artificial sequence
  Synthetic oligonucleotide
cctagttttcggcact

SEQ ID NO: 172 - DNA, 16 bp, Artificial sequence
  Synthetic oligonucleotide
agagagcgatagatct

SEQ ID NO: 173 - DNA, 16 bp, Artificial sequence
  Synthetic oligonucleotide
caccacgattgttaca

SEQ ID NO: 174 - DNA, 16 bp, Artificial sequence
  Synthetic oligonucleotide
atcggctggatatact

SEQ ID NO: 175 - DNA, 16 bp, Artificial sequence
  Synthetic oligonucleotide
cctcaaatgtcttggt

SEQ ID NO: 176 - DNA, 16 bp, Artificial sequence
  Synthetic oligonucleotide
cgatggaagaagtgct

SEQ ID NO: 177 - DNA, 16 bp, Artificial sequence
  Synthetic oligonucleotide
agccactgtgacgatg

SEQ ID NO: 178 - DNA, 16 bp, Artificial sequence
  Synthetic oligonucleotide
ttgctggaacaatatg

SEQ ID NO: 179 - DNA, 16 bp, Artificial sequence
  Synthetic oligonucleotide
gttttgataccagttt

SEQ ID NO: 180 - DNA, 16 bp, Artificial sequence
  Synthetic oligonucleotide
caatacaggccataat

SEQ ID NO: 181 - DNA, 16 bp, Artificial sequence
  Synthetic oligonucleotide
ctatcagacttcttac

SEQ ID NO: 182 - DNA, 16 bp, Artificial sequence
  Synthetic oligonucleotide
atattgatatacgatg

SEQ ID NO: 183 - DNA, 16 bp, Artificial sequence
  Synthetic oligonucleotide
tattctgcatacgatt

SEQ ID NO: 184 - DNA, 16 bp, Artificial sequence
  Synthetic oligonucleotide
tctctggctggagctt

SEQ ID NO: 185 - DNA, 16 bp, Artificial sequence
  Synthetic oligonucleotide
agcattgattcgaaac

SEQ ID NO: 186 - DNA, 16 bp, Artificial sequence
  Synthetic oligonucleotide
gtttgactgctgctag

SEQ ID NO: 187 - DNA, 16 bp, Artificial sequence
  Synthetic oligonucleotide
gaggtagcttttgtcc

SEQ ID NO: 188 - DNA, 16 bp, Artificial sequence
  Synthetic oligonucleotide
aacagtcttaaacctt

SEQ ID NO: 189 - DNA, 16 bp, Artificial sequence
  Synthetic oligonucleotide
catggctacagattgg

SEQ ID NO: 190 - DNA, 16 bp, Artificial sequence
  Synthetic oligonucleotide
tcttagctgtgcactc

SEQ ID NO: 191 - DNA, 16 bp, Artificial sequence
  Synthetic oligonucleotide
tgtccaggttgagata

SEQ ID NO: 192 - DNA, 16 bp, Artificial sequence
  Synthetic oligonucleotide
atagagttgcaccgtt

SEQ ID NO: 193 - DNA, 16 bp, Artificial sequence
  Synthetic oligonucleotide
tccacttttggtggac

SEQ ID NO: 194 - DNA, 16 bp, Artificial sequence
  Synthetic oligonucleotide
gtcggtcacctttcat

SEQ ID NO: 195 - DNA, 16 bp, Artificial sequence
  Synthetic oligonucleotide
acatctctgggaccaa

SEQ ID NO: 196 - DNA, 16 bp, Artificial sequence
  Synthetic oligonucleotide
taatagccagtacagt

SEQ ID NO: 197 - DNA, 16 bp, Artificial sequence
  Synthetic oligonucleotide
tgggagtcggattatt

SEQ ID NO: 198 - DNA, 16 bp, Artificial sequence
  Synthetic oligonucleotide
tagtccatgcaaaagc

SEQ ID NO: 199 - DNA, 16 bp, Artificial sequence
  Synthetic oligonucleotide
aagtagatggtaagtc

SEQ ID NO: 200 - DNA, 16 bp, Artificial sequence
  Synthetic oligonucleotide
atgtcataaaaatcgc

SEQ ID NO: 201 - DNA, 16 bp, Artificial sequence
  Synthetic oligonucleotide
atactaatgtccaagg

SEQ ID NO: 202 - DNA, 16 bp, Artificial sequence
  Synthetic oligonucleotide
gatttgaaggttagat

SEQ ID NO: 203 - DNA, 16 bp, Artificial sequence
  Synthetic oligonucleotide
gcctaaaggagatctg

SEQ ID NO: 204 - DNA, 16 bp, Artificial sequence
  Synthetic oligonucleotide
tagcaaaacacttgct

SEQ ID NO: 205 - DNA, 16 bp, Artificial sequence
  Synthetic oligonucleotide
ggatgttaggacccag

SEQ ID NO: 206 - DNA, 16 bp, Artificial sequence
  Synthetic oligonucleotide
atacttttccgtctca

SEQ ID NO: 207 - DNA, 16 bp, Artificial sequence
  Synthetic oligonucleotide
ctctaggagatataac

SEQ ID NO: 208 - DNA, 16 bp, Artificial sequence
  Synthetic oligonucleotide
actatgtaataggcag

SEQ ID NO: 209 - DNA, 16 bp, Artificial sequence
  Synthetic oligonucleotide
aaatttgtgaacctgc

SEQ ID NO: 210 - DNA, 16 bp, Artificial sequence
  Synthetic oligonucleotide
aactaggaagtgatcc

SEQ ID NO: 211 - DNA, 16 bp, Artificial sequence
  Synthetic oligonucleotide
acctaataactacatg

SEQ ID NO: 212 - DNA, 16 bp, Artificial sequence
  Synthetic oligonucleotide
ccaatataatccaaag

SEQ ID NO: 213 - DNA, 16 bp, Artificial sequence
  Synthetic oligonucleotide
taaggcaaagatctgg

SEQ ID NO: 214 - DNA, 16 bp, Artificial sequence
  Synthetic oligonucleotide
cgtccaaaagtgtcct

SEQ ID NO: 215 - DNA, 16 bp, Artificial sequence
  Synthetic oligonucleotide
ccctagattctacact

SEQ ID NO: 216 - DNA, 16 bp, Artificial sequence
  Synthetic oligonucleotide
ggatagtgaacataca

SEQ ID NO: 217 - DNA, 16 bp, Artificial sequence
  Synthetic oligonucleotide
tgtattaagacagttg

SEQ ID NO: 218 - DNA, 16 bp, Artificial sequence
  Synthetic oligonucleotide
ccaaatcaggtagttt

SEQ ID NO: 219 - DNA, 16 bp, Artificial sequence
  Synthetic oligonucleotide
agtaaacgactctgta

SEQ ID NO: 220 - DNA, 16 bp, Artificial sequence
  Synthetic oligonucleotide
ttttagtcaggtagag

SEQ ID NO: 221 - DNA, 16 bp, Artificial sequence
  Synthetic oligonucleotide
atcctacatgtaaggt

SEQ ID NO: 222 - DNA, 16 bp, Artificial sequence
  Synthetic oligonucleotide
gttagctaagggagag

SEQ ID NO: 223 - DNA, 16 bp, Artificial sequence
  Synthetic oligonucleotide
ttaaagacagggtggt

SEQ ID NO: 224 - DNA, 16 bp, Artificial sequence
  Synthetic oligonucleotide
tgttaagcagatggct

SEQ ID NO: 225 - DNA, 16 bp, Artificial sequence
  Synthetic oligonucleotide
aatgaggcggcactca

SEQ ID NO: 226 - DNA, 16 bp, Artificial sequence
  Synthetic oligonucleotide
tgacaatgtgcagctc

SEQ ID NO: 227 - DNA, 16 bp, Artificial sequence
  Synthetic oligonucleotide
acccttaggaaagctc

SEQ ID NO: 228 - DNA, 16 bp, Artificial sequence
  Synthetic oligonucleotide
atatcaatgccttagc

SEQ ID NO: 229 - DNA, 16 bp, Artificial sequence
  Synthetic oligonucleotide
gattattatgtgattg

SEQ ID NO: 230 - DNA, 16 bp, Artificial sequence
  Synthetic oligonucleotide
tatactgaaggctgtg

SEQ ID NO: 231 - DNA, 16 bp, Artificial sequence
  Synthetic oligonucleotide
gaattgctcacccttt

SEQ ID NO: 232 - DNA, 16 bp, Artificial sequence
  Synthetic oligonucleotide
taggattaatcatggg

SEQ ID NO: 233 - DNA, 16 bp, Artificial sequence
  Synthetic oligonucleotide
cagtaggtgtgtttca

SEQ ID NO: 234 - DNA, 16 bp, Artificial sequence
  Synthetic oligonucleotide
aaaaagctctattggt

SEQ ID NO: 235 - DNA, 16 bp, Artificial sequence
  Synthetic oligonucleotide
gatatgtcaatactcc

SEQ ID NO: 236 - DNA, 16 bp, Artificial sequence
  Synthetic oligonucleotide
catttgaagtctatac

SEQ ID NO: 237 - DNA, 16 bp, Artificial sequence
  Synthetic oligonucleotide
gatacaccaatgcagt

SEQ ID NO: 238 - DNA, 16 bp, Artificial sequence
  Synthetic oligonucleotide
tgctagtaattgcatc

SEQ ID NO: 239 - DNA, 16 bp, Artificial sequence
  Synthetic oligonucleotide
ggctataactggaagg

SEQ ID NO: 240 - DNA, 16 bp, Artificial sequence
  Synthetic oligonucleotide
atgctaaaagctcacc

SEQ ID NO: 241 - DNA, 16 bp, Artificial sequence
  Synthetic oligonucleotide
cttaagatacccaggt

SEQ ID NO: 242 - DNA, 16 bp, Artificial sequence
  Synthetic oligonucleotide
ttattagaagtcagcc

SEQ ID NO: 243 - DNA, 16 bp, Artificial sequence
  Synthetic oligonucleotide
tggctatagtaattgc

SEQ ID NO: 244 - DNA, 16 bp, Artificial sequence
  Synthetic oligonucleotide
cctagggaggaggtac

SEQ ID NO: 245 - DNA, 16 bp, Artificial sequence
  Synthetic oligonucleotide
ggatgatgttcatggc

SEQ ID NO: 246 - DNA, 16 bp, Artificial sequence
  Synthetic oligonucleotide
acgactccaagtagga

SEQ ID NO: 247 - DNA, 16 bp, Artificial sequence
  Synthetic oligonucleotide
tgcctgcctattccat

SEQ ID NO: 248 - DNA, 16 bp, Artificial sequence
  Synthetic oligonucleotide
ccgcgcttattaatat

SEQ ID NO: 249 - DNA, 16 bp, Artificial sequence
  Synthetic oligonucleotide
gcctagttttcggcac

SEQ ID NO: 250 - DNA, 16 bp, Artificial sequence
  Synthetic oligonucleotide
tagagagcgatagatc

SEQ ID NO: 251 - DNA, 16 bp, Artificial sequence
  Synthetic oligonucleotide
tcaccacgattgttac

SEQ ID NO: 252 - DNA, 16 bp, Artificial sequence
  Synthetic oligonucleotide
gatcggctggatatac

SEQ ID NO: 253 - DNA, 16 bp, Artificial sequence
  Synthetic oligonucleotide
acctcaaatgtcttgg

SEQ ID NO: 254 - DNA, 16 bp, Artificial sequence
  Synthetic oligonucleotide
tcgatggaagaagtgc

SEQ ID NO: 255 - DNA, 16 bp, Artificial sequence
  Synthetic oligonucleotide
tgaagccactgtgacg

SEQ ID NO: 256 - DNA, 16 bp, Artificial sequence
  Synthetic oligonucleotide
ggcaaatttgctggaa

SEQ ID NO: 257 - DNA, 16 bp, Artificial sequence
  Synthetic oligonucleotide
ggttttgataccagtt

SEQ ID NO: 258 - DNA, 16 bp, Artificial sequence
  Synthetic oligonucleotide
ccaatacaggccataa

SEQ ID NO: 259 - DNA, 16 bp, Artificial sequence
  Synthetic oligonucleotide
tctatcagacttctta

SEQ ID NO: 260 - DNA, 16 bp, Artificial sequence
  Synthetic oligonucleotide
gatattgatatacgat

SEQ ID NO: 261 - DNA, 16 bp, Artificial sequence
  Synthetic oligonucleotide
atattctgcatacgat

SEQ ID NO: 262 - DNA, 16 bp, Artificial sequence
  Synthetic oligonucleotide
catctctggctggagc

SEQ ID NO: 263 - DNA, 16 bp, Artificial sequence
  Synthetic oligonucleotide
cagcattgattcgaaa

SEQ ID NO: 264 - DNA, 16 bp, Artificial sequence
  Synthetic oligonucleotide
cgtttgactgctgcta

SEQ ID NO: 265 - DNA, 16 bp, Artificial sequence
  Synthetic oligonucleotide
ggaggtagcttttgtc

SEQ ID NO: 266 - DNA, 16 bp, Artificial sequence
  Synthetic oligonucleotide
gaacagtcttaaacct

SEQ ID NO: 267 - DNA, 16 bp, Artificial sequence
  Synthetic oligonucleotide
gcatggctacagattg

SEQ ID NO: 268 - DNA, 16 bp, Artificial sequence
  Synthetic oligonucleotide
ctcttagctgtgcact

SEQ ID NO: 269 - DNA, 16 bp, Artificial sequence
  Synthetic oligonucleotide
atgtccaggttgagat

SEQ ID NO: 270 - DNA, 16 bp, Artificial sequence
  Synthetic oligonucleotide
aatagagttgcaccgt

SEQ ID NO: 271 - DNA, 16 bp, Artificial sequence
  Synthetic oligonucleotide
gtccacttttggtgga

SEQ ID NO: 272 - DNA, 16 bp, Artificial sequence
  Synthetic oligonucleotide
agtcggtcacctttca

SEQ ID NO: 273 - DNA, 16 bp, Artificial sequence
  Synthetic oligonucleotide
aacatctctgggacca

SEQ ID NO: 274 - DNA, 16 bp, Artificial sequence
  Synthetic oligonucleotide
gtaatagccagtacag

SEQ ID NO: 275 - DNA, 16 bp, Artificial sequence
  Synthetic oligonucleotide
gtgggagtcggattat

SEQ ID NO: 276 - DNA, 16 bp, Artificial sequence
  Synthetic oligonucleotide
gaggatagtccatgca

SEQ ID NO: 277 - DNA, 16 bp, Artificial sequence
  Synthetic oligonucleotide
gataagtagatggtaa

SEQ ID NO: 278 - DNA, 16 bp, Artificial sequence
  Synthetic oligonucleotide
ttctatcaacctgcac

SEQ ID NO: 279 - DNA, 16 bp, Artificial sequence
  Synthetic oligonucleotide
aatactaatgtccaag

SEQ ID NO: 280 - DNA, 16 bp, Artificial sequence
  Synthetic oligonucleotide
atatagccctttcccc

SEQ ID NO: 281 - DNA, 16 bp, Artificial sequence
  Synthetic oligonucleotide
cgcctaaaggagatct

SEQ ID NO: 282 - DNA, 16 bp, Artificial sequence
  Synthetic oligonucleotide
gttagcaaaacacttg

SEQ ID NO: 283 - DNA, 16 bp, Artificial sequence
  Synthetic oligonucleotide
aaacatggatgttagg

SEQ ID NO: 284 - DNA, 16 bp, Artificial sequence
  Synthetic oligonucleotide
tatacttttccgtctc

SEQ ID NO: 285 - DNA, 16 bp, Artificial sequence
  Synthetic oligonucleotide
tactctaggagatata

SEQ ID NO: 286 - DNA, 16 bp, Artificial sequence
  Synthetic oligonucleotide
caactatgtaataggc

SEQ ID NO: 287 - DNA, 16 bp, Artificial sequence
  Synthetic oligonucleotide
aagaaatttgtgaacc

SEQ ID NO: 288 - DNA, 16 bp, Artificial sequence
  Synthetic oligonucleotide
agttaataggactaaa

SEQ ID NO: 289 - DNA, 16 bp, Artificial sequence
  Synthetic oligonucleotide
aacctaataactacat

SEQ ID NO: 290 - DNA, 16 bp, Artificial sequence
  Synthetic oligonucleotide
gaccaatataatccaa

SEQ ID NO: 291 - DNA, 16 bp, Artificial sequence
  Synthetic oligonucleotide
gattaaggcaaagatc

SEQ ID NO: 292 - DNA, 16 bp, Artificial sequence
  Synthetic oligonucleotide
ctagaacacttgcctc

SEQ ID NO: 293 - DNA, 16 bp, Artificial sequence
  Synthetic oligonucleotide
gaatccagatctgccc

SEQ ID NO: 294 - DNA, 16 bp, Artificial sequence
  Synthetic oligonucleotide
gaggatagtgaacata

SEQ ID NO: 295 - DNA, 16 bp, Artificial sequence
  Synthetic oligonucleotide
ctgtattaagacagtt

SEQ ID NO: 296 - DNA, 16 bp, Artificial sequence
  Synthetic oligonucleotide
tccaaatcaggtagtt

SEQ ID NO: 297 - DNA, 16 bp, Artificial sequence
  Synthetic oligonucleotide
gagtaaacgactctgt

SEQ ID NO: 298 - DNA, 16 bp, Artificial sequence
  Synthetic oligonucleotide
cttttagtcaggtaga

SEQ ID NO: 299 - DNA, 16 bp, Artificial sequence
  Synthetic oligonucleotide
gcttaatgttcagttt

SEQ ID NO: 300 - DNA, 16 bp, Artificial sequence
  Synthetic oligonucleotide
aagcattgttagctaa

SEQ ID NO: 301 - DNA, 16 bp, Artificial sequence
  Synthetic oligonucleotide
atttatttgctggtcc

SEQ ID NO: 302 - DNA, 16 bp, Artificial sequence
  Synthetic oligonucleotide
tatactaggattagaa

SEQ ID NO: 303 - DNA, 16 bp, Artificial sequence
  Synthetic oligonucleotide
aaatgaggcggcactc

SEQ ID NO: 304 - DNA, 16 bp, Artificial sequence
  Synthetic oligonucleotide
aatgtaagaagccacg

SEQ ID NO: 305 - DNA, 16 bp, Artificial sequence
  Synthetic oligonucleotide
cccaagagtggcagga

SEQ ID NO: 306 - DNA, 16 bp, Artificial sequence
  Synthetic oligonucleotide
catatcaatgccttag

SEQ ID NO: 307 - DNA, 16 bp, Artificial sequence
  Synthetic oligonucleotide
gcagattattatgtga

SEQ ID NO: 308 - DNA, 16 bp, Artificial sequence
  Synthetic oligonucleotide
ttatactgaaggctgt

SEQ ID NO: 309 - DNA, 16 bp, Artificial sequence
  Synthetic oligonucleotide
atacattagcaagcta

SEQ ID NO: 310 - DNA, 16 bp, Artificial sequence
  Synthetic oligonucleotide
ctaggattaatcatgg

SEQ ID NO: 311 - DNA, 16 bp, Artificial sequence
  Synthetic oligonucleotide
tccagtaggtgtgttt

SEQ ID NO: 312 - DNA, 16 bp, Artificial sequence
  Synthetic oligonucleotide
ctctattgggccaggc

SEQ ID NO: 313 - DNA, 16 bp, Artificial sequence
  Synthetic oligonucleotide
gatattatgttcttgg

SEQ ID NO: 314 - DNA, 16 bp, Artificial sequence
  Synthetic oligonucleotide
ggaaattgttgctgtt

SEQ ID NO: 315 - DNA, 16 bp, Artificial sequence
  Synthetic oligonucleotide
gaaattgatacaccaa

SEQ ID NO: 316 - DNA, 16 bp, Artificial sequence
  Synthetic oligonucleotide
atgctagtaattgcat

SEQ ID NO: 317 - DNA, 16 bp, Artificial sequence
  Synthetic oligonucleotide
agaattaagggctata

SEQ ID NO: 318 - DNA, 16 bp, Artificial sequence
  Synthetic oligonucleotide
gatgctaaaagctcac

SEQ ID NO: 319 - DNA, 16 bp, Artificial sequence
  Synthetic oligonucleotide
tcttaagatacccagg

SEQ ID NO: 320 - DNA, 16 bp, Artificial sequence
  Synthetic oligonucleotide
gttattagaagtcagc

SEQ ID NO: 321 - DNA, 16 bp, Artificial sequence
  Synthetic oligonucleotide
aattatgccttgtggc

SEQ ID NO: 322 - DNA, 16 bp, Artificial sequence
  Synthetic oligonucleotide
tcctagggaggaggta

SEQ ID NO: 323 - DNA, 16 bp, Artificial sequence
  Synthetic oligonucleotide
aggatgatgttcatgg

SEQ ID NO: 324 - DNA, 16 bp, Artificial sequence
  Synthetic oligonucleotide
aacgactccaagtagg

SEQ ID NO: 325 - DNA, 16 bp, Artificial sequence
  Synthetic oligonucleotide
gtctgcctgcctattc

SEQ ID NO: 326 - DNA, 16 bp, Artificial sequence
  Synthetic oligonucleotide
accgcgcttattaata

SEQ ID NO: 327 - DNA, 16 bp, Artificial sequence
  Synthetic oligonucleotide
cgcctagttttcggca

SEQ ID NO: 328 - DNA, 16 bp, Artificial sequence
  Synthetic oligonucleotide
ttagagagcgatagat

SEQ ID NO: 329 - DNA, 16 bp, Artificial sequence
  Synthetic oligonucleotide
ttcaccacgattgtta

SEQ ID NO: 330 - DNA, 16 bp, Artificial sequence
  Synthetic oligonucleotide
agatcggctggatata

SEQ ID NO: 331 - DNA, 16 bp, Artificial sequence
  Synthetic oligonucleotide
gacctcaaatgtcttg

SEQ ID NO: 332 - DNA, 16 bp, Artificial sequence
  Synthetic oligonucleotide
atcgatggaagaagtg

SEQ ID NO: 333 - DNA, 16 bp, Artificial sequence
  Synthetic oligonucleotide
cgcacactgaagccac

SEQ ID NO: 334 - DNA, 16 bp, Artificial sequence
  Synthetic oligonucleotide
cggcaaatttgctgga

SEQ ID NO: 335 - DNA, 16 bp, Artificial sequence
  Synthetic oligonucleotide
aggttttgataccagt

SEQ ID NO: 336 - DNA, 16 bp, Artificial sequence
  Synthetic oligonucleotide
tccaatacaggccata

SEQ ID NO: 337 - DNA, 16 bp, Artificial sequence
  Synthetic oligonucleotide
catctatcagacttct

SEQ ID NO: 338 - DNA, 16 bp, Artificial sequence
  Synthetic oligonucleotide
agatattgatatacga

SEQ ID NO: 339 - DNA, 16 bp, Artificial sequence
  Synthetic oligonucleotide
aatattctgcatacga

SEQ ID NO: 340 - DNA, 16 bp, Artificial sequence
  Synthetic oligonucleotide
acatctctggctggag

SEQ ID NO: 341 - DNA, 16 bp, Artificial sequence
  Synthetic oligonucleotide
gcagcattgattcgaa

SEQ ID NO: 342 - DNA, 16 bp, Artificial sequence
  Synthetic oligonucleotide
taattaatcttgttcg

SEQ ID NO: 343 - DNA, 16 bp, Artificial sequence
  Synthetic oligonucleotide
gggaggtagcttttgt

SEQ ID NO: 344 - DNA, 16 bp, Artificial sequence
  Synthetic oligonucleotide
tgaacagtcttaaacc

SEQ ID NO: 345 - DNA, 16 bp, Artificial sequence
  Synthetic oligonucleotide
ggcatggctacagatt

SEQ ID NO: 346 - DNA, 16 bp, Artificial sequence
  Synthetic oligonucleotide
tctcttagctgtgcac

SEQ ID NO: 347 - DNA, 16 bp, Artificial sequence
  Synthetic oligonucleotide
tatgtccaggttgaga

SEQ ID NO: 348 - DNA, 16 bp, Artificial sequence
  Synthetic oligonucleotide
gaatagagttgcaccg

SEQ ID NO: 349 - DNA, 16 bp, Artificial sequence
  Synthetic oligonucleotide
ggtccacttttggtgg

SEQ ID NO: 350 - DNA, 16 bp, Artificial sequence
  Synthetic oligonucleotide
gagtcggtcacctttc

SEQ ID NO: 351 - DNA, 16 bp, Artificial sequence
  Synthetic oligonucleotide
taaacatctctgggac

SEQ ID NO: 352 - DNA, 16 bp, Artificial sequence
  Synthetic oligonucleotide
tgtaatagccagtaca

SEQ ID NO: 353 - DNA, 16 bp, Artificial sequence
  Synthetic oligonucleotide
agtgggagtcggatta

SEQ ID NO: 354 - DNA, 16 bp, Artificial sequence
  Synthetic oligonucleotide
agaggatagtccatgc

SEQ ID NO: 355 - DNA, 16 bp, Artificial sequence
  Synthetic oligonucleotide
aagataagtagatggt

SEQ ID NO: 356 - DNA, 16 bp, Artificial sequence
  Synthetic oligonucleotide
agcttggaaggagact

SEQ ID NO: 357 - DNA, 16 bp, Artificial sequence
  Synthetic oligonucleotide
gttaatgtagtgttta

SEQ ID NO: 358 - DNA, 16 bp, Artificial sequence
  Synthetic oligonucleotide
aatatagccctttccc

SEQ ID NO: 359 - DNA, 16 bp, Artificial sequence
  Synthetic oligonucleotide
tcgcctaaaggagatc

SEQ ID NO: 360 - DNA, 16 bp, Artificial sequence
  Synthetic oligonucleotide
tgcaaaatgtgatgcc

SEQ ID NO: 361 - DNA, 16 bp, Artificial sequence
  Synthetic oligonucleotide
caaacatggatgttag

SEQ ID NO: 362 - DNA, 16 bp, Artificial sequence
  Synthetic oligonucleotide
ttatacttttccgtct

SEQ ID NO: 363 - DNA, 16 bp, Artificial sequence
  Synthetic oligonucleotide
atagggagaccatgct

SEQ ID NO: 364 - DNA, 16 bp, Artificial sequence
  Synthetic oligonucleotide
aaaacattgctcttcg

SEQ ID NO: 365 - DNA, 16 bp, Artificial sequence
  Synthetic oligonucleotide
taaatcaggcagtcat

SEQ ID NO: 366 - DNA, 16 bp, Artificial sequence
  Synthetic oligonucleotide
aagttaataggactaa

SEQ ID NO: 367 - DNA, 16 bp, Artificial sequence
  Synthetic oligonucleotide
ataacctaataactac

SEQ ID NO: 368 - DNA, 16 bp, Artificial sequence
  Synthetic oligonucleotide
aagttttgggaccaat

SEQ ID NO: 369 - DNA, 16 bp, Artificial sequence
  Synthetic oligonucleotide
cttgattaaggcaaag

SEQ ID NO: 370 - DNA, 16 bp, Artificial sequence
  Synthetic oligonucleotide
atctagaacacttgcc

SEQ ID NO: 371 - DNA, 16 bp, Artificial sequence
  Synthetic oligonucleotide
ctggtaaaggtaaggg

SEQ ID NO: 372 - DNA, 16 bp, Artificial sequence
  Synthetic oligonucleotide
agaggatagtgaacat

SEQ ID NO: 373 - DNA, 16 bp, Artificial sequence
  Synthetic oligonucleotide
actgtattaagacagt

SEQ ID NO: 374 - DNA, 16 bp, Artificial sequence
  Synthetic oligonucleotide
ttccaaatcaggtagt

SEQ ID NO: 375 - DNA, 16 bp, Artificial sequence
  Synthetic oligonucleotide
tgagtaaacgactctg

SEQ ID NO: 376 - DNA, 16 bp, Artificial sequence
  Synthetic oligonucleotide
acttttagtcaggtag

SEQ ID NO: 377 - DNA, 16 bp, Artificial sequence
  Synthetic oligonucleotide
ggcttaatgttcagtt

SEQ ID NO: 378 - DNA, 16 bp, Artificial sequence
  Synthetic oligonucleotide
ttaagcattgttagct

SEQ ID NO: 379 - DNA, 16 bp, Artificial sequence
  Synthetic oligonucleotide
aatttatttgctggtc

SEQ ID NO: 380 - DNA, 16 bp, Artificial sequence
  Synthetic oligonucleotide
atatactaggattaga

SEQ ID NO: 381 - DNA, 16 bp, Artificial sequence
  Synthetic oligonucleotide
caaatgaggcggcact

SEQ ID NO: 382 - DNA, 16 bp, Artificial sequence
  Synthetic oligonucleotide
gcaaatgtaagaagcc

SEQ ID NO: 383 - DNA, 16 bp, Artificial sequence
  Synthetic oligonucleotide
ctatcatgccttcccc

SEQ ID NO: 384 - DNA, 16 bp, Artificial sequence
  Synthetic oligonucleotide
tacatatcaatgcctt

SEQ ID NO: 385 - DNA, 16 bp, Artificial sequence
  Synthetic oligonucleotide
tgcagattattatgtg

SEQ ID NO: 386 - DNA, 16 bp, Artificial sequence
  Synthetic oligonucleotide
cttatactgaaggctg

SEQ ID NO: 387 - DNA, 16 bp, Artificial sequence
  Synthetic oligonucleotide
cattataagctaacta

SEQ ID NO: 388 - DNA, 16 bp, Artificial sequence
  Synthetic oligonucleotide
ggctaggattaatcat

SEQ ID NO: 389 - DNA, 16 bp, Artificial sequence
  Synthetic oligonucleotide
atccagtaggtgtgtt

SEQ ID NO: 390 - DNA, 16 bp, Artificial sequence
  Synthetic oligonucleotide
ataatagctctattgg

SEQ ID NO: 391 - DNA, 16 bp, Artificial sequence
  Synthetic oligonucleotide
caagacttaaacacca

SEQ ID NO: 392 - DNA, 16 bp, Artificial sequence
  Synthetic oligonucleotide
gggaaattgttgctgt

SEQ ID NO: 393 - DNA, 16 bp, Artificial sequence
  Synthetic oligonucleotide
ctgaaattgatacacc

SEQ ID NO: 394 - DNA, 16 bp, Artificial sequence
  Synthetic oligonucleotide
aaaccttcatgctagt

SEQ ID NO: 395 - DNA, 16 bp, Artificial sequence
  Synthetic oligonucleotide
tagaattaagggctat

SEQ ID NO: 396 - DNA, 16 bp, Artificial sequence
  Synthetic oligonucleotide
gattaatcttgatgct

SEQ ID NO: 397 - DNA, 16 bp, Artificial sequence
  Synthetic oligonucleotide
atcttaagatacccag

SEQ ID NO: 398 - DNA, 16 bp, Artificial sequence
  Synthetic oligonucleotide
gcagttattagaagtc

SEQ ID NO: 399 - DNA, 16 bp, Artificial sequence
  Synthetic oligonucleotide
gtaaaattatgccttg

SEQ ID NO: 400 - DNA, 16 bp, Artificial sequence
  Synthetic oligonucleotide
gtcctagggaggaggt

SEQ ID NO: 401 - DNA, 16 bp, Artificial sequence
  Synthetic oligonucleotide
taggatgatgttcatg

SEQ ID NO: 402 - DNA, 16 bp, Artificial sequence
  Synthetic oligonucleotide
caacgactccaagtag

SEQ ID NO: 403 - DNA, 16 bp, Artificial sequence
  Synthetic oligonucleotide
agtctgcctgcctatt

SEQ ID NO: 404 - DNA, 16 bp, Artificial sequence
  Synthetic oligonucleotide
caccgcgcttattaat

SEQ ID NO: 405 - DNA, 16 bp, Artificial sequence
  Synthetic oligonucleotide
acgcctagttttcggc

SEQ ID NO: 406 - DNA, 16 bp, Artificial sequence
  Synthetic oligonucleotide
tttagagagcgataga

SEQ ID NO: 407 - DNA, 16 bp, Artificial sequence
  Synthetic oligonucleotide
attcaccacgattgtt

SEQ ID NO: 408 - DNA, 16 bp, Artificial sequence
  Synthetic oligonucleotide
aagatcggctggatat

SEQ ID NO: 409 - DNA, 16 bp, Artificial sequence
  Synthetic oligonucleotide
ttgacctcaaatgtct

SEQ ID NO: 410 - DNA, 16 bp, Artificial sequence
  Synthetic oligonucleotide
catcgatggaagaagt

SEQ ID NO: 411 - DNA, 16 bp, Artificial sequence
  Synthetic oligonucleotide
ccgcacactgaagcca

SEQ ID NO: 412 - DNA, 16 bp, Artificial sequence
  Synthetic oligonucleotide
gcggcaaatttgctgg

SEQ ID NO: 413 - DNA, 16 bp, Artificial sequence
  Synthetic oligonucleotide
gaggttttgataccag

SEQ ID NO: 414 - DNA, 16 bp, Artificial sequence
  Synthetic oligonucleotide
ctccaatacaggccat

SEQ ID NO: 415 - DNA, 16 bp, Artificial sequence
  Synthetic oligonucleotide
ccatctatcagacttc

SEQ ID NO: 416 - DNA, 16 bp, Artificial sequence
  Synthetic oligonucleotide
aagatattgatatacg

SEQ ID NO: 417 - DNA, 16 bp, Artificial sequence
  Synthetic oligonucleotide
gaatattctgcatacg

SEQ ID NO: 418 - DNA, 16 bp, Artificial sequence
  Synthetic oligonucleotide
tacatctctggctgga

SEQ ID NO: 419 - DNA, 16 bp, Artificial sequence
  Synthetic oligonucleotide
tgcagcattgattcga

SEQ ID NO: 420 - DNA, 16 bp, Artificial sequence
  Synthetic oligonucleotide
gtaattaatcttgttc

SEQ ID NO: 421 - DNA, 16 bp, Artificial sequence
  Synthetic oligonucleotide
agggaggtagcttttg

SEQ ID NO: 422 - DNA, 16 bp, Artificial sequence
  Synthetic oligonucleotide
ttgaacagtcttaaac

SEQ ID NO: 423 - DNA, 16 bp, Artificial sequence
  Synthetic oligonucleotide
tggcatggctacagat

SEQ ID NO: 424 - DNA, 16 bp, Artificial sequence
  Synthetic oligonucleotide
atctcttagctgtgca

SEQ ID NO: 425 - DNA, 16 bp, Artificial sequence
  Synthetic oligonucleotide
atatgtccaggttgag

SEQ ID NO: 426 - DNA, 16 bp, Artificial sequence
  Synthetic oligonucleotide
agaatagagttgcacc

SEQ ID NO: 427 - DNA, 16 bp, Artificial sequence
  Synthetic oligonucleotide
gggtccacttttggtg

SEQ ID NO: 428 - DNA, 16 bp, Artificial sequence
  Synthetic oligonucleotide
agagtcggtcaccttt

SEQ ID NO: 429 - DNA, 16 bp, Artificial sequence
  Synthetic oligonucleotide
gtctaaacatctctgg

SEQ ID NO: 430 - DNA, 16 bp, Artificial sequence
  Synthetic oligonucleotide
atgtaatagccagtac

SEQ ID NO: 431 - DNA, 16 bp, Artificial sequence
  Synthetic oligonucleotide
tagtgggagtcggatt

SEQ ID NO: 432 - DNA, 16 bp, Artificial sequence
  Synthetic oligonucleotide
aagaggatagtccatg

SEQ ID NO: 433 - DNA, 16 bp, Artificial sequence
  Synthetic oligonucleotide
agggaatttatcaaac

SEQ ID NO: 434 - DNA, 16 bp, Artificial sequence
  Synthetic oligonucleotide
catttagcagcttgga

SEQ ID NO: 435 - DNA, 16 bp, Artificial sequence
  Synthetic oligonucleotide
gttgttaatgtagtgt

SEQ ID NO: 436 - DNA, 16 bp, Artificial sequence
  Synthetic oligonucleotide
atacgacttccttcta

SEQ ID NO: 437 - DNA, 16 bp, Artificial sequence
  Synthetic oligonucleotide
gaaaactcagccagca

SEQ ID NO: 438 - DNA, 16 bp, Artificial sequence
  Synthetic oligonucleotide
agctagacaattgcaa

SEQ ID NO: 439 - DNA, 16 bp, Artificial sequence
  Synthetic oligonucleotide
ccaaacatggatgtta

SEQ ID NO: 440 - DNA, 16 bp, Artificial sequence
  Synthetic oligonucleotide
attatacttttccgtc

SEQ ID NO: 441 - DNA, 16 bp, Artificial sequence
  Synthetic oligonucleotide
tttcatagggagacca

SEQ ID NO: 442 - DNA, 16 bp, Artificial sequence
  Synthetic oligonucleotide
ctaaagcaggctactt

SEQ ID NO: 443 - DNA, 16 bp, Artificial sequence
  Synthetic oligonucleotide
ttaaatcaggcagtca

SEQ ID NO: 444 - DNA, 16 bp, Artificial sequence
  Synthetic oligonucleotide
aaagttaataggacta

SEQ ID NO: 445 - DNA, 16 bp, Artificial sequence
  Synthetic oligonucleotide
cataacctaataacta

SEQ ID NO: 446 - DNA, 16 bp, Artificial sequence
  Synthetic oligonucleotide
tcaaagttttgggacc

SEQ ID NO: 447 - DNA, 16 bp, Artificial sequence
  Synthetic oligonucleotide
tccacttgaattctgt

SEQ ID NO: 448 - DNA, 16 bp, Artificial sequence
  Synthetic oligonucleotide
gatctagaacacttgc

SEQ ID NO: 449 - DNA, 16 bp, Artificial sequence
  Synthetic oligonucleotide
gctggtaaaggtaagg

SEQ ID NO: 450 - DNA, 16 bp, Artificial sequence
  Synthetic oligonucleotide
ctccaaattcccaacc

SEQ ID NO: 451 - DNA, 16 bp, Artificial sequence
  Synthetic oligonucleotide
aaatcttgtgtaactg

SEQ ID NO: 452 - DNA, 16 bp, Artificial sequence
  Synthetic oligonucleotide
gacaatgacatagacg

SEQ ID NO: 453 - DNA, 16 bp, Artificial sequence
  Synthetic oligonucleotide
ctgagtaaacgactct

SEQ ID NO: 454 - DNA, 16 bp, Artificial sequence
  Synthetic oligonucleotide
caacttttagtcaggt

SEQ ID NO: 455 - DNA, 16 bp, Artificial sequence
  Synthetic oligonucleotide
tggcttaatgttcagt

SEQ ID NO: 456 - DNA, 16 bp, Artificial sequence
  Synthetic oligonucleotide
attaagcattgttagc

SEQ ID NO: 457 - DNA, 16 bp, Artificial sequence
  Synthetic oligonucleotide
caatttatttgctggt

SEQ ID NO: 458 - DNA, 16 bp, Artificial sequence
  Synthetic oligonucleotide
tatatactaggattag

SEQ ID NO: 459 - DNA, 16 bp, Artificial sequence
  Synthetic oligonucleotide
ctcaaatgaggcggca

SEQ ID NO: 460 - DNA, 16 bp, Artificial sequence
  Synthetic oligonucleotide
cgtagcaaatgtaaga

SEQ ID NO: 461 - DNA, 16 bp, Artificial sequence
  Synthetic oligonucleotide
atctatcatgccttcc

SEQ ID NO: 462 - DNA, 16 bp, Artificial sequence
  Synthetic oligonucleotide
ttacatatcaatgcct

SEQ ID NO: 463 - DNA, 16 bp, Artificial sequence
  Synthetic oligonucleotide
gttaaaacttcattcc

SEQ ID NO: 464 - DNA, 16 bp, Artificial sequence
  Synthetic oligonucleotide
ccttatactgaaggct

SEQ ID NO: 465 - DNA, 16 bp, Artificial sequence
  Synthetic oligonucleotide
tcattataagctaact

SEQ ID NO: 466 - DNA, 16 bp, Artificial sequence
  Synthetic oligonucleotide
gaggaatggctaggat

SEQ ID NO: 467 - DNA, 16 bp, Artificial sequence
  Synthetic oligonucleotide
catatccagtaggtgt

SEQ ID NO: 468 - DNA, 16 bp, Artificial sequence
  Synthetic oligonucleotide
ccataataatagctct

SEQ ID NO: 469 - DNA, 16 bp, Artificial sequence
  Synthetic oligonucleotide
aaagttagttgggcga

SEQ ID NO: 470 - DNA, 16 bp, Artificial sequence
  Synthetic oligonucleotide
tgggaaattgttgctg

SEQ ID NO: 471 - DNA, 16 bp, Artificial sequence
  Synthetic oligonucleotide
actgaaattgatacac

SEQ ID NO: 472 - DNA, 16 bp, Artificial sequence
  Synthetic oligonucleotide
gaaaccttcatgctag

SEQ ID NO: 473 - DNA, 16 bp, Artificial sequence
  Synthetic oligonucleotide
ctagaattaagggcta

SEQ ID NO: 474 - DNA, 16 bp, Artificial sequence
  Synthetic oligonucleotide
tgattaatcttgatgc

SEQ ID NO: 475 - DNA, 16 bp, Artificial sequence
  Synthetic oligonucleotide
catcttaagataccca

SEQ ID NO: 476 - DNA, 16 bp, Artificial sequence
  Synthetic oligonucleotide
cctaaacaaacactat

SEQ ID NO: 477 - DNA, 16 bp, Artificial sequence
  Synthetic oligonucleotide
acagtaaaattatgcc

SEQ ID NO: 478 - DNA, 16 bp, Artificial sequence
  Synthetic oligonucleotide
tagtcctagggaggag

SEQ ID NO: 479 - DNA, 16 bp, Artificial sequence
  Synthetic oligonucleotide
ctaggatgatgttcat

SEQ ID NO: 480 - DNA, 16 bp, Artificial sequence
  Synthetic oligonucleotide
ccaacgactccaagta

SEQ ID NO: 481 - DNA, 16 bp, Artificial sequence
  Synthetic oligonucleotide
tagtctgcctgcctat

SEQ ID NO: 482 - DNA, 16 bp, Artificial sequence
  Synthetic oligonucleotide
acaccgcgcttattaa

SEQ ID NO: 483 - DNA, 16 bp, Artificial sequence
  Synthetic oligonucleotide
gcatgcgcagtgacgc

SEQ ID NO: 484 - DNA, 16 bp, Artificial sequence
  Synthetic oligonucleotide
atttagagagcgatag

SEQ ID NO: 485 - DNA, 16 bp, Artificial sequence
  Synthetic oligonucleotide
tattcaccacgattgt

SEQ ID NO: 486 - DNA, 16 bp, Artificial sequence
  Synthetic oligonucleotide
gaagatcggctggata

SEQ ID NO: 487 - DNA, 16 bp, Artificial sequence
  Synthetic oligonucleotide
gttgacctcaaatgtc

SEQ ID NO: 488 - DNA, 16 bp, Artificial sequence
  Synthetic oligonucleotide
tcatcgatggaagaag

SEQ ID NO: 489 - DNA, 16 bp, Artificial sequence
  Synthetic oligonucleotide
gccgcacactgaagcc

SEQ ID NO: 490 - DNA, 16 bp, Artificial sequence
  Synthetic oligonucleotide
agcggcaaatttgctg

SEQ ID NO: 491 - DNA, 16 bp, Artificial sequence
  Synthetic oligonucleotide
tgaggttttgatacca

SEQ ID NO: 492 - DNA, 16 bp, Artificial sequence
  Synthetic oligonucleotide
tctccaatacaggcca

SEQ ID NO: 493 - DNA, 16 bp, Artificial sequence
  Synthetic oligonucleotide
tccatctatcagactt

SEQ ID NO: 494 - DNA, 16 bp, Artificial sequence
  Synthetic oligonucleotide
gtagtctcagaaagat

SEQ ID NO: 495 - DNA, 16 bp, Artificial sequence
  Synthetic oligonucleotide
cactgcttcaaattga

SEQ ID NO: 496 - DNA, 16 bp, Artificial sequence
  Synthetic oligonucleotide
atacatctctggctgg

SEQ ID NO: 497 - DNA, 16 bp, Artificial sequence
  Synthetic oligonucleotide
ttgcagcattgattcg

SEQ ID NO: 498 - DNA, 16 bp, Artificial sequence
  Synthetic oligonucleotide
ggtaattaatcttgtt

SEQ ID NO: 499 - DNA, 16 bp, Artificial sequence
  Synthetic oligonucleotide
tagggaggtagctttt

SEQ ID NO: 500 - DNA, 16 bp, Artificial sequence
  Synthetic oligonucleotide
cttgaacagtcttaaa

SEQ ID NO: 501 - DNA, 16 bp, Artificial sequence
  Synthetic oligonucleotide
gtggcatggctacaga

SEQ ID NO: 502 - DNA, 16 bp, Artificial sequence
  Synthetic oligonucleotide
gatctcttagctgtgc

SEQ ID NO: 503 - DNA, 16 bp, Artificial sequence
  Synthetic oligonucleotide
aatatgtccaggttga

SEQ ID NO: 504 - DNA, 16 bp, Artificial sequence
  Synthetic oligonucleotide
cagaatagagttgcac

SEQ ID NO: 505 - DNA, 16 bp, Artificial sequence
  Synthetic oligonucleotide
agggtccacttttggt

SEQ ID NO: 506 - DNA, 16 bp, Artificial sequence
  Synthetic oligonucleotide
tagagtcggtcacctt

SEQ ID NO: 507 - DNA, 16 bp, Artificial sequence
  Synthetic oligonucleotide
tgtctaaacatctctg

SEQ ID NO: 508 - DNA, 16 bp, Artificial sequence
  Synthetic oligonucleotide
tatgtaatagccagta

SEQ ID NO: 509 - DNA, 16 bp, Artificial sequence
  Synthetic oligonucleotide
gtagtgggagtcggat

SEQ ID NO: 510 - DNA, 16 bp, Artificial sequence
  Synthetic oligonucleotide
caagaggatagtccat

SEQ ID NO: 511 - DNA, 16 bp, Artificial sequence
  Synthetic oligonucleotide
agactaagggaccagg

SEQ ID NO: 512 - DNA, 16 bp, Artificial sequence
  Synthetic oligonucleotide
tcatttagcagcttgg

SEQ ID NO: 513 - DNA, 16 bp, Artificial sequence
  Synthetic oligonucleotide
acaatttttccaatcc

SEQ ID NO: 514 - DNA, 16 bp, Artificial sequence
  Synthetic oligonucleotide
aatacgacttccttct

SEQ ID NO: 515 - DNA, 16 bp, Artificial sequence
  Synthetic oligonucleotide
tgaaaactcagccagc

SEQ ID NO: 516 - DNA, 16 bp, Artificial sequence
  Synthetic oligonucleotide
ttataactgagctaga

SEQ ID NO: 517 - DNA, 16 bp, Artificial sequence
  Synthetic oligonucleotide
cccaaacatggatgtt

SEQ ID NO: 518 - DNA, 16 bp, Artificial sequence
  Synthetic oligonucleotide
aattatacttttccgt

SEQ ID NO: 519 - DNA, 16 bp, Artificial sequence
  Synthetic oligonucleotide
ctttcatagggagacc

SEQ ID NO: 520 - DNA, 16 bp, Artificial sequence
  Synthetic oligonucleotide
tctaaagcaggctact

SEQ ID NO: 521 - DNA, 16 bp, Artificial sequence
  Synthetic oligonucleotide
ccaatttaaatcaggc

SEQ ID NO: 522 - DNA, 16 bp, Artificial sequence
  Synthetic oligonucleotide
caaagttaataggact

SEQ ID NO: 523 - DNA, 16 bp, Artificial sequence
  Synthetic oligonucleotide
gtctaaagtgctggtt

SEQ ID NO: 524 - DNA, 16 bp, Artificial sequence
  Synthetic oligonucleotide
gaacactttcactggg

SEQ ID NO: 525 - DNA, 16 bp, Artificial sequence
  Synthetic oligonucleotide
accaagtagcttacat

SEQ ID NO: 526 - DNA, 16 bp, Artificial sequence
  Synthetic oligonucleotide
ggatctagaacacttg

SEQ ID NO: 527 - DNA, 16 bp, Artificial sequence
  Synthetic oligonucleotide
atgtgaagagctggta

SEQ ID NO: 528 - DNA, 16 bp, Artificial sequence
  Synthetic oligonucleotide
cccaagctacctccaa

SEQ ID NO: 529 - DNA, 16 bp, Artificial sequence
  Synthetic oligonucleotide
gtgaaatcttgtgtaa

SEQ ID NO: 530 - DNA, 16 bp, Artificial sequence
  Synthetic oligonucleotide
agacaatgacatagac

SEQ ID NO: 531 - DNA, 16 bp, Artificial sequence
  Synthetic oligonucleotide
actgagtaaacgactc

SEQ ID NO: 532 - DNA, 16 bp, Artificial sequence
  Synthetic oligonucleotide
ccctttatgtctttgg

SEQ ID NO: 533 - DNA, 16 bp, Artificial sequence
  Synthetic oligonucleotide
ctattgattggcttaa

SEQ ID NO: 534 - DNA, 16 bp, Artificial sequence
  Synthetic oligonucleotide
aaatttgctggaactg

SEQ ID NO: 535 - DNA, 16 bp, Artificial sequence
  Synthetic oligonucleotide
agctagatactcaatt

SEQ ID NO: 536 - DNA, 16 bp, Artificial sequence
  Synthetic oligonucleotide
gaatatatactaggat

SEQ ID NO: 537 - DNA, 16 bp, Artificial sequence
  Synthetic oligonucleotide
cctcaaatgaggcggc

SEQ ID NO: 538 - DNA, 16 bp, Artificial sequence
  Synthetic oligonucleotide
attaagtactgtgaga

SEQ ID NO: 539 - DNA, 16 bp, Artificial sequence
  Synthetic oligonucleotide
catctatcatgccttc

SEQ ID NO: 540 - DNA, 16 bp, Artificial sequence
  Synthetic oligonucleotide
attacatatcaatgcc

SEQ ID NO: 541 - DNA, 16 bp, Artificial sequence
  Synthetic oligonucleotide
agcgaatgttaaaact

SEQ ID NO: 542 - DNA, 16 bp, Artificial sequence
  Synthetic oligonucleotide
tccttatactgaaggc

SEQ ID NO: 543 - DNA, 16 bp, Artificial sequence
  Synthetic oligonucleotide
ctcattataagctaac

SEQ ID NO: 544 - DNA, 16 bp, Artificial sequence
  Synthetic oligonucleotide
agtagtggagccagac

SEQ ID NO: 545 - DNA, 16 bp, Artificial sequence
  Synthetic oligonucleotide
tcatatccagtaggtg

SEQ ID NO: 546 - DNA, 16 bp, Artificial sequence
  Synthetic oligonucleotide
tccataataatagctc

SEQ ID NO: 547 - DNA, 16 bp, Artificial sequence
  Synthetic oligonucleotide
cgtcaaaaaccgtcaa

SEQ ID NO: 548 - DNA, 16 bp, Artificial sequence
  Synthetic oligonucleotide
gagtatttcctctggg

SEQ ID NO: 549 - DNA, 16 bp, Artificial sequence
  Synthetic oligonucleotide
actaatttagtcaact

SEQ ID NO: 550 - DNA, 16 bp, Artificial sequence
  Synthetic oligonucleotide
tttaactaccctcaca

SEQ ID NO: 551 - DNA, 16 bp, Artificial sequence
  Synthetic oligonucleotide
tctagaattaagggct

SEQ ID NO: 552 - DNA, 16 bp, Artificial sequence
  Synthetic oligonucleotide
ctgattaatcttgatg

SEQ ID NO: 553 - DNA, 16 bp, Artificial sequence
  Synthetic oligonucleotide
gcatcttaagataccc

SEQ ID NO: 554 - DNA, 16 bp, Artificial sequence
  Synthetic oligonucleotide
gcctaaacaaacacta

SEQ ID NO: 555 - DNA, 16 bp, Artificial sequence
  Synthetic oligonucleotide
catagtggacttcatt

SEQ ID NO: 556 - DNA, 16 bp, Artificial sequence
  Synthetic oligonucleotide
gtagtcctagggagga

SEQ ID NO: 557 - DNA, 16 bp, Artificial sequence
  Synthetic oligonucleotide
tctaggatgatgttca

SEQ ID NO: 558 - DNA, 16 bp, Artificial sequence
  Synthetic oligonucleotide
accaacgactccaagt

SEQ ID NO: 559 - DNA, 16 bp, Artificial sequence
  Synthetic oligonucleotide
gtagtctgcctgccta

SEQ ID NO: 560 - DNA, 16 bp, Artificial sequence
  Synthetic oligonucleotide
cacaccgcgcttatta

SEQ ID NO: 561 - DNA, 16 bp, Artificial sequence
  Synthetic oligonucleotide
cgcatgcgcagtgacg

SEQ ID NO: 562 - DNA, 16 bp, Artificial sequence
  Synthetic oligonucleotide
gatttagagagcgata

SEQ ID NO: 563 - DNA, 16 bp, Artificial sequence
  Synthetic oligonucleotide
ttattcaccacgattg

SEQ ID NO: 564 - DNA, 16 bp, Artificial sequence
  Synthetic oligonucleotide
agaagatcggctggat

SEQ ID NO: 565 - DNA, 16 bp, Artificial sequence
  Synthetic oligonucleotide
tgttgacctcaaatgt

SEQ ID NO: 566 - DNA, 16 bp, Artificial sequence
  Synthetic oligonucleotide
atcatcgatggaagaa

SEQ ID NO: 567 - DNA, 16 bp, Artificial sequence
  Synthetic oligonucleotide
ggccgcacactgaagc

SEQ ID NO: 568 - DNA, 16 bp, Artificial sequence
  Synthetic oligonucleotide
gccaacagcggcaaat

SEQ ID NO: 569 - DNA, 16 bp, Artificial sequence
  Synthetic oligonucleotide
atgaggttttgatacc

SEQ ID NO: 570 - DNA, 16 bp, Artificial sequence
  Synthetic oligonucleotide
gtctccaatacaggcc

SEQ ID NO: 571 - DNA, 16 bp, Artificial sequence
  Synthetic oligonucleotide
ttccatctatcagact

SEQ ID NO: 572 - DNA, 16 bp, Artificial sequence
  Synthetic oligonucleotide
aaacttctgtagtctc

SEQ ID NO: 573 - DNA, 16 bp, Artificial sequence
  Synthetic oligonucleotide
ccactgcttcaaattg

SEQ ID NO: 574 - DNA, 16 bp, Artificial sequence
  Synthetic oligonucleotide
catacatctctggctg

SEQ ID NO: 575 - DNA, 16 bp, Artificial sequence
  Synthetic oligonucleotide
tttgcagcattgattc

SEQ ID NO: 576 - DNA, 16 bp, Artificial sequence
  Synthetic oligonucleotide
caggtaattaatcttg

SEQ ID NO: 577 - DNA, 16 bp, Artificial sequence
  Synthetic oligonucleotide
ttagggaggtagcttt

SEQ ID NO: 578 - DNA, 16 bp, Artificial sequence
  Synthetic oligonucleotide
acttgaacagtcttaa

SEQ ID NO: 579 - DNA, 16 bp, Artificial sequence
  Synthetic oligonucleotide
tgtggcatggctacag

SEQ ID NO: 580 - DNA, 16 bp, Artificial sequence
  Synthetic oligonucleotide
tgatctcttagctgtg

SEQ ID NO: 581 - DNA, 16 bp, Artificial sequence
  Synthetic oligonucleotide
aaatatgtccaggttg

SEQ ID NO: 582 - DNA, 16 bp, Artificial sequence
  Synthetic oligonucleotide
ccagaatagagttgca

SEQ ID NO: 583 - DNA, 16 bp, Artificial sequence
  Synthetic oligonucleotide
gagggtccacttttgg

SEQ ID NO: 584 - DNA, 16 bp, Artificial sequence
  Synthetic oligonucleotide
atagagtcggtcacct

SEQ ID NO: 585 - DNA, 16 bp, Artificial sequence
  Synthetic oligonucleotide
attgtctaaacatctc

SEQ ID NO: 586 - DNA, 16 bp, Artificial sequence
  Synthetic oligonucleotide
ttatgtaatagccagt

SEQ ID NO: 587 - DNA, 16 bp, Artificial sequence
  Synthetic oligonucleotide
tgtagtgggagtcgga

SEQ ID NO: 588 - DNA, 16 bp, Artificial sequence
  Synthetic oligonucleotide
acaagaggatagtcca

SEQ ID NO: 589 - DNA, 16 bp, Artificial sequence
  Synthetic oligonucleotide
cagactaagggaccag

SEQ ID NO: 590 - DNA, 16 bp, Artificial sequence
  Synthetic oligonucleotide
ctcatttagcagcttg

SEQ ID NO: 591 - DNA, 16 bp, Artificial sequence
  Synthetic oligonucleotide
caaggagtacttcaca

SEQ ID NO: 592 - DNA, 16 bp, Artificial sequence
  Synthetic oligonucleotide
taatacgacttccttc

SEQ ID NO: 593 - DNA, 16 bp, Artificial sequence
  Synthetic oligonucleotide
gcaaaaggagccagtt

SEQ ID NO: 594 - DNA, 16 bp, Artificial sequence
  Synthetic oligonucleotide
gttttataactgagct

SEQ ID NO: 595 - DNA, 16 bp, Artificial sequence
  Synthetic oligonucleotide
ctaaaccctggagcag

SEQ ID NO: 596 - DNA, 16 bp, Artificial sequence
  Synthetic oligonucleotide
aaattatacttttccg

SEQ ID NO: 597 - DNA, 16 bp, Artificial sequence
  Synthetic oligonucleotide
gaagaaggactttcat

SEQ ID NO: 598 - DNA, 16 bp, Artificial sequence
  Synthetic oligonucleotide
ctctaaagcaggctac

SEQ ID NO: 599 - DNA, 16 bp, Artificial sequence
  Synthetic oligonucleotide
tccaatttaaatcagg

SEQ ID NO: 600 - DNA, 16 bp, Artificial sequence
  Synthetic oligonucleotide
gcaaagttaataggac

SEQ ID NO: 601 - DNA, 16 bp, Artificial sequence
  Synthetic oligonucleotide
tggtctaaagtgctgg

SEQ ID NO: 602 - DNA, 16 bp, Artificial sequence
  Synthetic oligonucleotide
cccaaaaatgtcctag

SEQ ID NO: 603 - DNA, 16 bp, Artificial sequence
  Synthetic oligonucleotide
gaccaagtagcttaca

SEQ ID NO: 604 - DNA, 16 bp, Artificial sequence
  Synthetic oligonucleotide
atggatctagaacact

SEQ ID NO: 605 - DNA, 16 bp, Artificial sequence
  Synthetic oligonucleotide
atatgtgaagagctgg

SEQ ID NO: 606 - DNA, 16 bp, Artificial sequence
  Synthetic oligonucleotide
acccaagctacctcca

SEQ ID NO: 607 - DNA, 16 bp, Artificial sequence
  Synthetic oligonucleotide
agtgaaatcttgtgta

SEQ ID NO: 608 - DNA, 16 bp, Artificial sequence
  Synthetic oligonucleotide
gatcattgcagaaaga

SEQ ID NO: 609 - DNA, 16 bp, Artificial sequence
  Synthetic oligonucleotide
acatatggtgtacact

SEQ ID NO: 610 - DNA, 16 bp, Artificial sequence
  Synthetic oligonucleotide
gcaaatacagcagtac

SEQ ID NO: 611 - DNA, 16 bp, Artificial sequence
  Synthetic oligonucleotide
tctattgattggctta

SEQ ID NO: 612 - DNA, 16 bp, Artificial sequence
  Synthetic oligonucleotide
caaatttgctggaact

SEQ ID NO: 613 - DNA, 16 bp, Artificial sequence
  Synthetic oligonucleotide
aaggagctagatactc

SEQ ID NO: 614 - DNA, 16 bp, Artificial sequence
  Synthetic oligonucleotide
cagaatatatactagg

SEQ ID NO: 615 - DNA, 16 bp, Artificial sequence
  Synthetic oligonucleotide
taagagtcagtatcct

SEQ ID NO: 616 - DNA, 16 bp, Artificial sequence
  Synthetic oligonucleotide
tattaagtactgtgag

SEQ ID NO: 617 - DNA, 16 bp, Artificial sequence
  Synthetic oligonucleotide
cattatccttactccc

SEQ ID NO: 618 - DNA, 16 bp, Artificial sequence
  Synthetic oligonucleotide
cattacatatcaatgc

SEQ ID NO: 619 - DNA, 16 bp, Artificial sequence
  Synthetic oligonucleotide
agttagggagccagcg

SEQ ID NO: 620 - DNA, 16 bp, Artificial sequence
  Synthetic oligonucleotide
ctggaggtatgtcata

SEQ ID NO: 621 - DNA, 16 bp, Artificial sequence
  Synthetic oligonucleotide
tgataaaatagggtgc

SEQ ID NO: 622 - DNA, 16 bp, Artificial sequence
  Synthetic oligonucleotide
gagtagtggagccaga

SEQ ID NO: 623 - DNA, 16 bp, Artificial sequence
  Synthetic oligonucleotide
tttcatatccagtagg

SEQ ID NO: 624 - DNA, 16 bp, Artificial sequence
  Synthetic oligonucleotide
aataactgttctcccc

SEQ ID NO: 625 - DNA, 16 bp, Artificial sequence
  Synthetic oligonucleotide
gacaacaaacaatggg

SEQ ID NO: 626 - DNA, 16 bp, Artificial sequence
  Synthetic oligonucleotide
agagtatttcctctgg

SEQ ID NO: 627 - DNA, 16 bp, Artificial sequence
  Synthetic oligonucleotide
cactaatttagtcaac

SEQ ID NO: 628 - DNA, 16 bp, Artificial sequence
  Synthetic oligonucleotide
ttttaactaccctcac

SEQ ID NO: 629 - DNA, 16 bp, Artificial sequence
  Synthetic oligonucleotide
atctagaattaagggc

SEQ ID NO: 630 - DNA, 16 bp, Artificial sequence
  Synthetic oligonucleotide
gctgattaatcttgat

SEQ ID NO: 631 - DNA, 16 bp, Artificial sequence
  Synthetic oligonucleotide
tccaaggagtgcatct

SEQ ID NO: 632 - DNA, 16 bp, Artificial sequence
  Synthetic oligonucleotide
ttattgcctgaacaca

SEQ ID NO: 633 - DNA, 16 bp, Artificial sequence
  Synthetic oligonucleotide
tcatagtggacttcat

SEQ ID NO: 634 - DNA, 16 bp, Artificial sequence
  Synthetic oligonucleotide
tgtagtcctagggagg

SEQ ID NO: 635 - DNA, 16 bp, Artificial sequence
  Synthetic oligonucleotide
ttctaggatgatgttc

SEQ ID NO: 636 - DNA, 16 bp, Artificial sequence
  Synthetic oligonucleotide
caccaacgactccaag

SEQ ID NO: 637 - DNA, 16 bp, Artificial sequence
  Synthetic oligonucleotide
taagtagtctgcctgc

SEQ ID NO: 638 - DNA, 16 bp, Artificial sequence
  Synthetic oligonucleotide
tccacaccgcgcttat

SEQ ID NO: 639 - DNA, 16 bp, Artificial sequence
  Synthetic oligonucleotide
acgcatgcgcagtgac

SEQ ID NO: 640 - DNA, 16 bp, Artificial sequence
  Synthetic oligonucleotide
tgatttagagagcgat

SEQ ID NO: 641 - DNA, 16 bp, Artificial sequence
  Synthetic oligonucleotide
attattcaccacgatt

SEQ ID NO: 642 - DNA, 16 bp, Artificial sequence
  Synthetic oligonucleotide
gagaagatcggctgga

SEQ ID NO: 643 - DNA, 16 bp, Artificial sequence
  Synthetic oligonucleotide
atgttgacctcaaatg

SEQ ID NO: 644 - DNA, 16 bp, Artificial sequence
  Synthetic oligonucleotide
catcatcgatggaaga

SEQ ID NO: 645 - DNA, 16 bp, Artificial sequence
  Synthetic oligonucleotide
tggccgcacactgaag

SEQ ID NO: 646 - DNA, 16 bp, Artificial sequence
  Synthetic oligonucleotide
gtgaaagccaacagcg

SEQ ID NO: 647 - DNA, 16 bp, Artificial sequence
  Synthetic oligonucleotide
gacatgaggttttgat

SEQ ID NO: 648 - DNA, 16 bp, Artificial sequence
  Synthetic oligonucleotide
tgtctccaatacaggc

SEQ ID NO: 649 - DNA, 16 bp, Artificial sequence
  Synthetic oligonucleotide
attccatctatcagac

SEQ ID NO: 650 - DNA, 16 bp, Artificial sequence
  Synthetic oligonucleotide
gaaacttctgtagtct

SEQ ID NO: 651 - DNA, 16 bp, Artificial sequence
  Synthetic oligonucleotide
ccaaccactgcttcaa

SEQ ID NO: 652 - DNA, 16 bp, Artificial sequence
  Synthetic oligonucleotide
gcatacatctctggct

SEQ ID NO: 653 - DNA, 16 bp, Artificial sequence
  Synthetic oligonucleotide
gctttgcagcattgat

SEQ ID NO: 654 - DNA, 16 bp, Artificial sequence
  Synthetic oligonucleotide
acaggtaattaatctt

SEQ ID NO: 655 - DNA, 16 bp, Artificial sequence
  Synthetic oligonucleotide
tttagggaggtagctt

SEQ ID NO: 656 - DNA, 16 bp, Artificial sequence
  Synthetic oligonucleotide
tacttgaacagtctta

SEQ ID NO: 657 - DNA, 16 bp, Artificial sequence
  Synthetic oligonucleotide
ctgtggcatggctaca

SEQ ID NO: 658 - DNA, 16 bp, Artificial sequence
  Synthetic oligonucleotide
ttgatctcttagctgt

SEQ ID NO: 659 - DNA, 16 bp, Artificial sequence
  Synthetic oligonucleotide
ctagggaaatctttca

SEQ ID NO: 660 - DNA, 16 bp, Artificial sequence
  Synthetic oligonucleotide
tccagaatagagttgc

SEQ ID NO: 661 - DNA, 16 bp, Artificial sequence
  Synthetic oligonucleotide
agagggtccacttttg

SEQ ID NO: 662 - DNA, 16 bp, Artificial sequence
  Synthetic oligonucleotide
aatagagtcggtcacc

SEQ ID NO: 663 - DNA, 16 bp, Artificial sequence
  Synthetic oligonucleotide
gcctaaaattgtctaa

SEQ ID NO: 664 - DNA, 16 bp, Artificial sequence
  Synthetic oligonucleotide
cttatgtaatagccag

SEQ ID NO: 665 - DNA, 16 bp, Artificial sequence
  Synthetic oligonucleotide
atgtagtgggagtcgg

SEQ ID NO: 666 - DNA, 16 bp, Artificial sequence
  Synthetic oligonucleotide
aacaagaggatagtcc

SEQ ID NO: 667 - DNA, 16 bp, Artificial sequence
  Synthetic oligonucleotide
acagactaagggacca

SEQ ID NO: 668 - DNA, 16 bp, Artificial sequence
  Synthetic oligonucleotide
cctcatttagcagctt

SEQ ID NO: 669 - DNA, 16 bp, Artificial sequence
  Synthetic oligonucleotide
ctcaaggagtacttca

SEQ ID NO: 670 - DNA, 16 bp, Artificial sequence
  Synthetic oligonucleotide
ttaatacgacttcctt

SEQ ID NO: 671 - DNA, 16 bp, Artificial sequence
  Synthetic oligonucleotide
ggcaaaaggagccagt

SEQ ID NO: 672 - DNA, 16 bp, Artificial sequence
  Synthetic oligonucleotide
gttaccagagcattca

SEQ ID NO: 673 - DNA, 16 bp, Artificial sequence
  Synthetic oligonucleotide
gctaaaccctggagca

SEQ ID NO: 674 - DNA, 16 bp, Artificial sequence
  Synthetic oligonucleotide
caagttttcacctcag

SEQ ID NO: 675 - DNA, 16 bp, Artificial sequence
  Synthetic oligonucleotide
gggaaagaagtctcct

SEQ ID NO: 676 - DNA, 16 bp, Artificial sequence
  Synthetic oligonucleotide
tctctaaagcaggcta

SEQ ID NO: 677 - DNA, 16 bp, Artificial sequence
  Synthetic oligonucleotide
tagcagctaaaatcca

SEQ ID NO: 678 - DNA, 16 bp, Artificial sequence
  Synthetic oligonucleotide
tgcaaagttaatagga

SEQ ID NO: 679 - DNA, 16 bp, Artificial sequence
  Synthetic oligonucleotide
ctatataaattctgac

SEQ ID NO: 680 - DNA, 16 bp, Artificial sequence
  Synthetic oligonucleotide
taagagaaggtgcaca

SEQ ID NO: 681 - DNA, 16 bp, Artificial sequence
  Synthetic oligonucleotide
gatactggtggacaag

SEQ ID NO: 682 - DNA, 16 bp, Artificial sequence
  Synthetic oligonucleotide
gtatagctgcatttct

SEQ ID NO: 683 - DNA, 16 bp, Artificial sequence
  Synthetic oligonucleotide
catatgtgaagagctg

SEQ ID NO: 684 - DNA, 16 bp, Artificial sequence
  Synthetic oligonucleotide
aactagaactcccaac

SEQ ID NO: 685 - DNA, 16 bp, Artificial sequence
  Synthetic oligonucleotide
ggctttatcattctaa

SEQ ID NO: 686 - DNA, 16 bp, Artificial sequence
  Synthetic oligonucleotide
taaggatcattgcaga

SEQ ID NO: 687 - DNA, 16 bp, Artificial sequence
  Synthetic oligonucleotide
ccatttacatatggtg

SEQ ID NO: 688 - DNA, 16 bp, Artificial sequence
  Synthetic oligonucleotide
ggcaaatacagcagta

SEQ ID NO: 689 - DNA, 16 bp, Artificial sequence
  Synthetic oligonucleotide
ctctattgattggctt

SEQ ID NO: 690 - DNA, 16 bp, Artificial sequence
  Synthetic oligonucleotide
cttaccttgtgcttgg

SEQ ID NO: 691 - DNA, 16 bp, Artificial sequence
  Synthetic oligonucleotide
gactaaggagctagat

SEQ ID NO: 692 - DNA, 16 bp, Artificial sequence
  Synthetic oligonucleotide
gcagaatatatactag

SEQ ID NO: 693 - DNA, 16 bp, Artificial sequence
  Synthetic oligonucleotide
gctgtaagagtcagta

SEQ ID NO: 694 - DNA, 16 bp, Artificial sequence
  Synthetic oligonucleotide
cttattaagtactgtg

SEQ ID NO: 695 - DNA, 16 bp, Artificial sequence
  Synthetic oligonucleotide
ccattatccttactcc

SEQ ID NO: 696 - DNA, 16 bp, Artificial sequence
  Synthetic oligonucleotide
ctacatggatccaaca

SEQ ID NO: 697 - DNA, 16 bp, Artificial sequence
  Synthetic oligonucleotide
gaggagttagggagcc

SEQ ID NO: 698 - DNA, 16 bp, Artificial sequence
  Synthetic oligonucleotide
acaactggaggtatgt

SEQ ID NO: 699 - DNA, 16 bp, Artificial sequence
  Synthetic oligonucleotide
ttgataaaatagggtg

SEQ ID NO: 700 - DNA, 16 bp, Artificial sequence
  Synthetic oligonucleotide
aggagtagtggagcca

SEQ ID NO: 701 - DNA, 16 bp, Artificial sequence
  Synthetic oligonucleotide
tatcagaaacttatac

SEQ ID NO: 702 - DNA, 16 bp, Artificial sequence
  Synthetic oligonucleotide
gaaataactgttctcc

SEQ ID NO: 703 - DNA, 16 bp, Artificial sequence
  Synthetic oligonucleotide
tccaatatatactgac

SEQ ID NO: 704 - DNA, 16 bp, Artificial sequence
  Synthetic oligonucleotide
gctgagagagtatttc

SEQ ID NO: 705 - DNA, 16 bp, Artificial sequence
  Synthetic oligonucleotide
acactaatttagtcaa

SEQ ID NO: 706 - DNA, 16 bp, Artificial sequence
  Synthetic oligonucleotide
cttttaactaccctca

SEQ ID NO: 707 - DNA, 16 bp, Artificial sequence
  Synthetic oligonucleotide
ccatctagaattaagg

SEQ ID NO: 708 - DNA, 16 bp, Artificial sequence
  Synthetic oligonucleotide
actgaaggtctgagct

SEQ ID NO: 709 - DNA, 16 bp, Artificial sequence
  Synthetic oligonucleotide
ctccaaggagtgcatc

SEQ ID NO: 710 - DNA, 16 bp, Artificial sequence
  Synthetic oligonucleotide
aaattattgcctgaac

SEQ ID NO: 711 - DNA, 16 bp, Artificial sequence
  Synthetic oligonucleotide
cttcatagtggacttc

SEQ ID NO: 712 - DNA, 16 bp, Artificial sequence
  Synthetic oligonucleotide
gtgtagtcctagggag

SEQ ID NO: 713 - DNA, 16 bp, Artificial sequence
  Synthetic oligonucleotide
gatttctaggatgatg

SEQ ID NO: 714 - DNA, 16 bp, Artificial sequence
  Synthetic oligonucleotide
tcaccaacgactccaa

SEQ ID NO: 715 - DNA, 16 bp, Artificial sequence
  Synthetic oligonucleotide
ataagtagtctgcctg

SEQ ID NO: 716 - DNA, 16 bp, Artificial sequence
  Synthetic oligonucleotide
ctccacaccgcgctta

SEQ ID NO: 717 - DNA, 16 bp, Artificial sequence
  Synthetic oligonucleotide
tacgcatgcgcagtga

SEQ ID NO: 718 - DNA, 16 bp, Artificial sequence
  Synthetic oligonucleotide
ctgatttagagagcga

SEQ ID NO: 719 - DNA, 16 bp, Artificial sequence
  Synthetic oligonucleotide
cattattcaccacgat

SEQ ID NO: 720 - DNA, 16 bp, Artificial sequence
  Synthetic oligonucleotide
tgagaagatcggctgg

SEQ ID NO: 721 - DNA, 16 bp, Artificial sequence
  Synthetic oligonucleotide
gatgttgacctcaaat

SEQ ID NO: 722 - DNA, 16 bp, Artificial sequence
  Synthetic oligonucleotide
ccatcatcgatggaag

SEQ ID NO: 723 - DNA, 16 bp, Artificial sequence
  Synthetic oligonucleotide
gtggccgcacactgaa

SEQ ID NO: 724 - DNA, 16 bp, Artificial sequence
  Synthetic oligonucleotide
ctctgtgaaagccaac

SEQ ID NO: 725 - DNA, 16 bp, Artificial sequence
  Synthetic oligonucleotide
gagacatgaggttttg

SEQ ID NO: 726 - DNA, 16 bp, Artificial sequence
  Synthetic oligonucleotide
ctgtctccaatacagg

SEQ ID NO: 727 - DNA, 16 bp, Artificial sequence
  Synthetic oligonucleotide
gtattccatctatcag

SEQ ID NO: 728 - DNA, 16 bp, Artificial sequence
  Synthetic oligonucleotide
cgttcaggaagaaact

SEQ ID NO: 729 - DNA, 16 bp, Artificial sequence
  Synthetic oligonucleotide
gccaaccactgcttca

SEQ ID NO: 730 - DNA, 16 bp, Artificial sequence
  Synthetic oligonucleotide
tgcatacatctctggc

SEQ ID NO: 731 - DNA, 16 bp, Artificial sequence
  Synthetic oligonucleotide
agctttgcagcattga

SEQ ID NO: 732 - DNA, 16 bp, Artificial sequence
  Synthetic oligonucleotide
gacaggtaattaatct

SEQ ID NO: 733 - DNA, 16 bp, Artificial sequence
  Synthetic oligonucleotide
ttttagggaggtagct

SEQ ID NO: 734 - DNA, 16 bp, Artificial sequence
  Synthetic oligonucleotide
ctacttgaacagtctt

SEQ ID NO: 735 - DNA, 16 bp, Artificial sequence
  Synthetic oligonucleotide
tctgtggcatggctac

SEQ ID NO: 736 - DNA, 16 bp, Artificial sequence
  Synthetic oligonucleotide
cttgatctcttagctg

SEQ ID NO: 737 - DNA, 16 bp, Artificial sequence
  Synthetic oligonucleotide
gctagggaaatctttc

SEQ ID NO: 738 - DNA, 16 bp, Artificial sequence
  Synthetic oligonucleotide
gtccagaatagagttg

SEQ ID NO: 739 - DNA, 16 bp, Artificial sequence
  Synthetic oligonucleotide
tagagggtccactttt

SEQ ID NO: 740 - DNA, 16 bp, Artificial sequence
  Synthetic oligonucleotide
aaatagagtcggtcac

SEQ ID NO: 741 - DNA, 16 bp, Artificial sequence
  Synthetic oligonucleotide
agcctaaaattgtcta

SEQ ID NO: 742 - DNA, 16 bp, Artificial sequence
  Synthetic oligonucleotide
tcttatgtaatagcca

SEQ ID NO: 743 - DNA, 16 bp, Artificial sequence
  Synthetic oligonucleotide
gatgtagtgggagtcg

SEQ ID NO: 744 - DNA, 16 bp, Artificial sequence
  Synthetic oligonucleotide
aaacaagaggatagtc

SEQ ID NO: 745 - DNA, 16 bp, Artificial sequence
  Synthetic oligonucleotide
tatacagactaaggga

SEQ ID NO: 746 - DNA, 16 bp, Artificial sequence
  Synthetic oligonucleotide
gataatatgtgacttg

SEQ ID NO: 747 - DNA, 16 bp, Artificial sequence
  Synthetic oligonucleotide
tctcaaggagtacttc

SEQ ID NO: 748 - DNA, 16 bp, Artificial sequence
  Synthetic oligonucleotide
tttaatacgacttcct

SEQ ID NO: 749 - DNA, 16 bp, Artificial sequence
  Synthetic oligonucleotide
caaactgctactgtgt

SEQ ID NO: 750 - DNA, 16 bp, Artificial sequence
  Synthetic oligonucleotide
taggctaaaccctgga

SEQ ID NO: 751 - DNA, 16 bp, Artificial sequence
  Synthetic oligonucleotide
ctctaatgtttcttga

SEQ ID NO: 752 - DNA, 16 bp, Artificial sequence
  Synthetic oligonucleotide
taaactgtatgcctct

SEQ ID NO: 753 - DNA, 16 bp, Artificial sequence
  Synthetic oligonucleotide
cagtaggcagtttctc

SEQ ID NO: 754 - DNA, 16 bp, Artificial sequence
  Synthetic oligonucleotide
ttcagttagcagctaa

SEQ ID NO: 755 - DNA, 16 bp, Artificial sequence
  Synthetic oligonucleotide
ctgcaaagttaatagg

SEQ ID NO: 756 - DNA, 16 bp, Artificial sequence
  Synthetic oligonucleotide
gtttatcagtaaagtg

SEQ ID NO: 757 - DNA, 16 bp, Artificial sequence
  Synthetic oligonucleotide
ttaagagaaggtgcac

SEQ ID NO: 758 - DNA, 16 bp, Artificial sequence
  Synthetic oligonucleotide
gccaagctttgtgtca

SEQ ID NO: 759 - DNA, 16 bp, Artificial sequence
  Synthetic oligonucleotide
tctgtatagctgcatt

SEQ ID NO: 760 - DNA, 16 bp, Artificial sequence
  Synthetic oligonucleotide
cacatatgtgaagagc

SEQ ID NO: 761 - DNA, 16 bp, Artificial sequence
  Synthetic oligonucleotide
atagaactagaactcc

SEQ ID NO: 762 - DNA, 16 bp, Artificial sequence
  Synthetic oligonucleotide
gataatttggtgtcat

SEQ ID NO: 763 - DNA, 16 bp, Artificial sequence
  Synthetic oligonucleotide
ttaaggatcattgcag

SEQ ID NO: 764 - DNA, 16 bp, Artificial sequence
  Synthetic oligonucleotide
cataaggccgattcat

SEQ ID NO: 765 - DNA, 16 bp, Artificial sequence
  Synthetic oligonucleotide
ggaaaggatatttggc

SEQ ID NO: 766 - DNA, 16 bp, Artificial sequence
  Synthetic oligonucleotide
actctattgattggct

SEQ ID NO: 767 - DNA, 16 bp, Artificial sequence
  Synthetic oligonucleotide
tgattttgaccttacc

SEQ ID NO: 768 - DNA, 16 bp, Artificial sequence
  Synthetic oligonucleotide
tgactaaggagctaga

SEQ ID NO: 769 - DNA, 16 bp, Artificial sequence
  Synthetic oligonucleotide
attaagcttagtatat

SEQ ID NO: 770 - DNA, 16 bp, Artificial sequence
  Synthetic oligonucleotide
agctaactcaggctgt

SEQ ID NO: 771 - DNA, 16 bp, Artificial sequence
  Synthetic oligonucleotide
gcatacttattaagta

SEQ ID NO: 772 - DNA, 16 bp, Artificial sequence
  Synthetic oligonucleotide
tccattatccttactc

SEQ ID NO: 773 - DNA, 16 bp, Artificial sequence
  Synthetic oligonucleotide
tctacatggatccaac

SEQ ID NO: 774 - DNA, 16 bp, Artificial sequence
  Synthetic oligonucleotide
tgtaaaggctgggtga

SEQ ID NO: 775 - DNA, 16 bp, Artificial sequence
  Synthetic oligonucleotide
tatgacaactggaggt

SEQ ID NO: 776 - DNA, 16 bp, Artificial sequence
  Synthetic oligonucleotide
gttgataaaatagggt

SEQ ID NO: 777 - DNA, 16 bp, Artificial sequence
  Synthetic oligonucleotide
aaggagtagtggagcc

SEQ ID NO: 778 - DNA, 16 bp, Artificial sequence
  Synthetic oligonucleotide
gttatcagaaacttat

SEQ ID NO: 779 - DNA, 16 bp, Artificial sequence
  Synthetic oligonucleotide
ttatagactgggtagg

SEQ ID NO: 780 - DNA, 16 bp, Artificial sequence
  Synthetic oligonucleotide
gtttagcaatttagca

SEQ ID NO: 781 - DNA, 16 bp, Artificial sequence
  Synthetic oligonucleotide
atttagaaactgctcc

SEQ ID NO: 782 - DNA, 16 bp, Artificial sequence
  Synthetic oligonucleotide
gcttagtaccaagaca

SEQ ID NO: 783 - DNA, 16 bp, Artificial sequence
  Synthetic oligonucleotide
ccttttaactaccctc

SEQ ID NO: 784 - DNA, 16 bp, Artificial sequence
  Synthetic oligonucleotide
aggctaaaatggtcat

SEQ ID NO: 785 - DNA, 16 bp, Artificial sequence
  Synthetic oligonucleotide
ctaaaactgaaggtct

SEQ ID NO: 786 - DNA, 16 bp, Artificial sequence
  Synthetic oligonucleotide
taggaacattccctct

SEQ ID NO: 787 - DNA, 16 bp, Artificial sequence
  Synthetic oligonucleotide
tctaaattattgcctg

SEQ ID NO: 788 - DNA, 16 bp, Artificial sequence
  Synthetic oligonucleotide
acttcatagtggactt

SEQ ID NO: 789 - DNA, 16 bp, Artificial sequence
  Synthetic oligonucleotide
tgtgtagtcctaggga

SEQ ID NO: 790 - DNA, 16 bp, Artificial sequence
  Synthetic oligonucleotide
ggatttctaggatgat

SEQ ID NO: 791 - DNA, 16 bp, Artificial sequence
  Synthetic oligonucleotide
ttcaccaacgactcca

SEQ ID NO: 792 - DNA, 16 bp, Artificial sequence
  Synthetic oligonucleotide
cataagtagtctgcct

SEQ ID NO: 793 - DNA, 16 bp, Artificial sequence
  Synthetic oligonucleotide
cctccacaccgcgctt

SEQ ID NO: 794 - DNA, 16 bp, Artificial sequence
  Synthetic oligonucleotide
atacgcatgcgcagtg

SEQ ID NO: 795 - DNA, 16 bp, Artificial sequence
  Synthetic oligonucleotide
cctgatttagagagcg

SEQ ID NO: 796 - DNA, 16 bp, Artificial sequence
  Synthetic oligonucleotide
gcattattcaccacga

SEQ ID NO: 797 - DNA, 16 bp, Artificial sequence
  Synthetic oligonucleotide
ctgagaagatcggctg

SEQ ID NO: 798 - DNA, 16 bp, Artificial sequence
  Synthetic oligonucleotide
ggatgttgacctcaaa

SEQ ID NO: 799 - DNA, 16 bp, Artificial sequence
  Synthetic oligonucleotide
tccatcatcgatggaa

SEQ ID NO: 800 - DNA, 16 bp, Artificial sequence
  Synthetic oligonucleotide
cgtggccgcacactga

SEQ ID NO: 801 - DNA, 16 bp, Artificial sequence
  Synthetic oligonucleotide
gacctctgtgaaagcc

SEQ ID NO: 802 - DNA, 16 bp, Artificial sequence
  Synthetic oligonucleotide
ttcacaaaaactgggc

SEQ ID NO: 803 - DNA, 16 bp, Artificial sequence
  Synthetic oligonucleotide
tctgtctccaatacag

SEQ ID NO: 804 - DNA, 16 bp, Artificial sequence
  Synthetic oligonucleotide
agtattccatctatca

SEQ ID NO: 805 - DNA, 16 bp, Artificial sequence
  Synthetic oligonucleotide
aaatcgctgaggcgcg

SEQ ID NO: 806 - DNA, 16 bp, Artificial sequence
  Synthetic oligonucleotide
ggccaaccactgcttc

SEQ ID NO: 807 - DNA, 16 bp, Artificial sequence
  Synthetic oligonucleotide
atgcatacatctctgg

SEQ ID NO: 808 - DNA, 16 bp, Artificial sequence
  Synthetic oligonucleotide
aagctttgcagcattg

SEQ ID NO: 809 - DNA, 16 bp, Artificial sequence
  Synthetic oligonucleotide
agacaggtaattaatc

SEQ ID NO: 810 - DNA, 16 bp, Artificial sequence
  Synthetic oligonucleotide
cttttagggaggtagc

SEQ ID NO: 811 - DNA, 16 bp, Artificial sequence
  Synthetic oligonucleotide
gctacttgaacagtct

SEQ ID NO: 812 - DNA, 16 bp, Artificial sequence
  Synthetic oligonucleotide
ttctgtggcatggcta

SEQ ID NO: 813 - DNA, 16 bp, Artificial sequence
  Synthetic oligonucleotide
acttgatctcttagct

SEQ ID NO: 814 - DNA, 16 bp, Artificial sequence
  Synthetic oligonucleotide
ggctagggaaatcttt

SEQ ID NO: 815 - DNA, 16 bp, Artificial sequence
  Synthetic oligonucleotide
agtccagaatagagtt

SEQ ID NO: 816 - DNA, 16 bp, Artificial sequence
  Synthetic oligonucleotide
atagagggtccacttt

SEQ ID NO: 817 - DNA, 16 bp, Artificial sequence
  Synthetic oligonucleotide
aaaatagagtcggtca

SEQ ID NO: 818 - DNA, 16 bp, Artificial sequence
  Synthetic oligonucleotide
gagcctaaaattgtct

SEQ ID NO: 819 - DNA, 16 bp, Artificial sequence
  Synthetic oligonucleotide
ttcttatgtaatagcc

SEQ ID NO: 820 - DNA, 16 bp, Artificial sequence
  Synthetic oligonucleotide
tgatgtagtgggagtc

SEQ ID NO: 821 - DNA, 16 bp, Artificial sequence
  Synthetic oligonucleotide
ctacaagaggttattt

SEQ ID NO: 822 - DNA, 16 bp, Artificial sequence
  Synthetic oligonucleotide
atatacagactaaggg

SEQ ID NO: 823 - DNA, 16 bp, Artificial sequence
  Synthetic oligonucleotide
aagttattatccccac

SEQ ID NO: 824 - DNA, 16 bp, Artificial sequence
  Synthetic oligonucleotide
aactaaacatgacagc

SEQ ID NO: 825 - DNA, 16 bp, Artificial sequence
  Synthetic oligonucleotide
ttttaatacgacttcc

SEQ ID NO: 826 - DNA, 16 bp, Artificial sequence
  Synthetic oligonucleotide
ataagagccaaactgc

SEQ ID NO: 827 - DNA, 16 bp, Artificial sequence
  Synthetic oligonucleotide
cataagttaccagagc

SEQ ID NO: 828 - DNA, 16 bp, Artificial sequence
  Synthetic oligonucleotide
ctgtaggctaaaccct

SEQ ID NO: 829 - DNA, 16 bp, Artificial sequence
  Synthetic oligonucleotide
gctctaatgtttcttg

SEQ ID NO: 830 - DNA, 16 bp, Artificial sequence
  Synthetic oligonucleotide
gtaaactgtatgcctc

SEQ ID NO: 831 - DNA, 16 bp, Artificial sequence
  Synthetic oligonucleotide
tacagtaggcagtttc

SEQ ID NO: 832 - DNA, 16 bp, Artificial sequence
  Synthetic oligonucleotide
cttcagttagcagcta

SEQ ID NO: 833 - DNA, 16 bp, Artificial sequence
  Synthetic oligonucleotide
actacattaacaccaa

SEQ ID NO: 834 - DNA, 16 bp, Artificial sequence
  Synthetic oligonucleotide
tgcaagtttatcagta

SEQ ID NO: 835 - DNA, 16 bp, Artificial sequence
  Synthetic oligonucleotide
cttaagagaaggtgca

SEQ ID NO: 836 - DNA, 16 bp, Artificial sequence
  Synthetic oligonucleotide
cttaacaaacctccac

SEQ ID NO: 837 - DNA, 16 bp, Artificial sequence
  Synthetic oligonucleotide
attatatgaggtctgt

SEQ ID NO: 838 - DNA, 16 bp, Artificial sequence
  Synthetic oligonucleotide
tcacatatgtgaagag

SEQ ID NO: 839 - DNA, 16 bp, Artificial sequence
  Synthetic oligonucleotide
catagaactagaactc

SEQ ID NO: 840 - DNA, 16 bp, Artificial sequence
  Synthetic oligonucleotide
tgataatttggtgtca

SEQ ID NO: 841 - DNA, 16 bp, Artificial sequence
  Synthetic oligonucleotide
cttaaggatcattgca

SEQ ID NO: 842 - DNA, 16 bp, Artificial sequence
  Synthetic oligonucleotide
gtaatcttgaggcagg

SEQ ID NO: 843 - DNA, 16 bp, Artificial sequence
  Synthetic oligonucleotide
tattatgaggatctgg

SEQ ID NO: 844 - DNA, 16 bp, Artificial sequence
  Synthetic oligonucleotide
agcagaattgtgaacg

SEQ ID NO: 845 - DNA, 16 bp, Artificial sequence
  Synthetic oligonucleotide
catacccattctaact

SEQ ID NO: 846 - DNA, 16 bp, Artificial sequence
  Synthetic oligonucleotide
ttgactaaggagctag

SEQ ID NO: 847 - DNA, 16 bp, Artificial sequence
  Synthetic oligonucleotide
cattaagcttagtata

SEQ ID NO: 848 - DNA, 16 bp, Artificial sequence
  Synthetic oligonucleotide
catagctaactcaggc

SEQ ID NO: 849 - DNA, 16 bp, Artificial sequence
  Synthetic oligonucleotide
cttacatattgcatac

SEQ ID NO: 850 - DNA, 16 bp, Artificial sequence
  Synthetic oligonucleotide
ctaagttagcccccag

SEQ ID NO: 851 - DNA, 16 bp, Artificial sequence
  Synthetic oligonucleotide
atctacatggatccaa

SEQ ID NO: 852 - DNA, 16 bp, Artificial sequence
  Synthetic oligonucleotide
gaatgtaaaggctggg

SEQ ID NO: 853 - DNA, 16 bp, Artificial sequence
  Synthetic oligonucleotide
ggagtatgacaactgg

SEQ ID NO: 854 - DNA, 16 bp, Artificial sequence
  Synthetic oligonucleotide
cgtttaaatcagagca

SEQ ID NO: 855 - DNA, 16 bp, Artificial sequence
  Synthetic oligonucleotide
taaggagtagtggagc

SEQ ID NO: 856 - DNA, 16 bp, Artificial sequence
  Synthetic oligonucleotide
attaatgccaccctac

SEQ ID NO: 857 - DNA, 16 bp, Artificial sequence
  Synthetic oligonucleotide
ctttttatagactggg

SEQ ID NO: 858 - DNA, 16 bp, Artificial sequence
  Synthetic oligonucleotide
aggtttagcaatttag

SEQ ID NO: 859 - DNA, 16 bp, Artificial sequence
  Synthetic oligonucleotide
atagttatcttctcac

SEQ ID NO: 860 - DNA, 16 bp, Artificial sequence
  Synthetic oligonucleotide
tattaatatgacttgc

SEQ ID NO: 861 - DNA, 16 bp, Artificial sequence
  Synthetic oligonucleotide
gccttttaactaccct

SEQ ID NO: 862 - DNA, 16 bp, Artificial sequence
  Synthetic oligonucleotide
taggctaaaatggtca

SEQ ID NO: 863 - DNA, 16 bp, Artificial sequence
  Synthetic oligonucleotide
gatctaaaactgaagg

SEQ ID NO: 864 - DNA, 16 bp, Artificial sequence
  Synthetic oligonucleotide
aatttcatacagttcg

SEQ ID NO: 865 - DNA, 16 bp, Artificial sequence
  Synthetic oligonucleotide
gtctaaattattgcct

SEQ ID NO: 866 - DNA, 16 bp, Artificial sequence
  Synthetic oligonucleotide
cataacttcatagtgg

SEQ ID NO: 867 - DNA, 16 bp, Artificial sequence
  Synthetic oligonucleotide
ttgtgtagtcctaggg

SEQ ID NO: 868 - DNA, 16 bp, Artificial sequence
  Synthetic oligonucleotide
gaaggatttctaggat

SEQ ID NO: 869 - DNA, 16 bp, Artificial sequence
  Synthetic oligonucleotide
cttcaccaacgactcc

SEQ ID NO: 870 - DNA, 16 bp, Artificial sequence
  Synthetic oligonucleotide
tcataagtagtctgcc

SEQ ID NO: 871 - DNA, 16 bp, Artificial sequence
  Synthetic oligonucleotide
tcctccacaccgcgct

SEQ ID NO: 872 - DNA, 16 bp, Artificial sequence
  Synthetic oligonucleotide
catacgcatgcgcagt

SEQ ID NO: 873 - DNA, 16 bp, Artificial sequence
  Synthetic oligonucleotide
acctgatttagagagc

SEQ ID NO: 874 - DNA, 16 bp, Artificial sequence
  Synthetic oligonucleotide
agcattattcaccacg

SEQ ID NO: 875 - DNA, 16 bp, Artificial sequence
  Synthetic oligonucleotide
gctgagaagatcggct

SEQ ID NO: 876 - DNA, 16 bp, Artificial sequence
  Synthetic oligonucleotide
aggatgttgacctcaa

SEQ ID NO: 877 - DNA, 16 bp, Artificial sequence
  Synthetic oligonucleotide
ctccatcatcgatgga

SEQ ID NO: 878 - DNA, 16 bp, Artificial sequence
  Synthetic oligonucleotide
gtaaggaatcccttcg

SEQ ID NO: 879 - DNA, 16 bp, Artificial sequence
  Synthetic oligonucleotide
agacctctgtgaaagc

SEQ ID NO: 880 - DNA, 16 bp, Artificial sequence
  Synthetic oligonucleotide
acccagtattcacaaa

SEQ ID NO: 881 - DNA, 16 bp, Artificial sequence
  Synthetic oligonucleotide
atctgtctccaataca

SEQ ID NO: 882 - DNA, 16 bp, Artificial sequence
  Synthetic oligonucleotide
aagtattccatctatc

SEQ ID NO: 883 - DNA, 16 bp, Artificial sequence
  Synthetic oligonucleotide
aaaatcgctgaggcgc

SEQ ID NO: 884 - DNA, 16 bp, Artificial sequence
  Synthetic oligonucleotide
tggccaaccactgctt

SEQ ID NO: 885 - DNA, 16 bp, Artificial sequence
  Synthetic oligonucleotide
catgcatacatctctg

SEQ ID NO: 886 - DNA, 16 bp, Artificial sequence
  Synthetic oligonucleotide
aataaagctttgcagc

SEQ ID NO: 887 - DNA, 16 bp, Artificial sequence
  Synthetic oligonucleotide
caggaagacaggtaat

SEQ ID NO: 888 - DNA, 16 bp, Artificial sequence
  Synthetic oligonucleotide
acttttagggaggtag

SEQ ID NO: 889 - DNA, 16 bp, Artificial sequence
  Synthetic oligonucleotide
tgctacttgaacagtc

SEQ ID NO: 890 - DNA, 16 bp, Artificial sequence
  Synthetic oligonucleotide
tattctgtggcatggc

SEQ ID NO: 891 - DNA, 16 bp, Artificial sequence
  Synthetic oligonucleotide
aacttgatctcttagc

SEQ ID NO: 892 - DNA, 16 bp, Artificial sequence
  Synthetic oligonucleotide
aggctagggaaatctt

SEQ ID NO: 893 - DNA, 16 bp, Artificial sequence
  Synthetic oligonucleotide
aagtccagaatagagt

SEQ ID NO: 894 - DNA, 16 bp, Artificial sequence
  Synthetic oligonucleotide
tatagagggtccactt

SEQ ID NO: 895 - DNA, 16 bp, Artificial sequence
  Synthetic oligonucleotide
taaaatagagtcggtc

SEQ ID NO: 896 - DNA, 16 bp, Artificial sequence
  Synthetic oligonucleotide
tgagcctaaaattgtc

SEQ ID NO: 897 - DNA, 16 bp, Artificial sequence
  Synthetic oligonucleotide
gtttcttatgtaatag

SEQ ID NO: 898 - DNA, 16 bp, Artificial sequence
  Synthetic oligonucleotide
ttgatgtagtgggagt

SEQ ID NO: 899 - DNA, 16 bp, Artificial sequence
  Synthetic oligonucleotide
actacaagaggttatt

SEQ ID NO: 900 - DNA, 16 bp, Artificial sequence
  Synthetic oligonucleotide
catatacagactaagg

SEQ ID NO: 901 - DNA, 16 bp, Artificial sequence
  Synthetic oligonucleotide
taagttattatcccca

SEQ ID NO: 902 - DNA, 16 bp, Artificial sequence
  Synthetic oligonucleotide
ctctaagtgtaagaga

SEQ ID NO: 903 - DNA, 16 bp, Artificial sequence
  Synthetic oligonucleotide
tttttaatacgacttc

SEQ ID NO: 904 - DNA, 16 bp, Artificial sequence
  Synthetic oligonucleotide
cataagagccaaactg

SEQ ID NO: 905 - DNA, 16 bp, Artificial sequence
  Synthetic oligonucleotide
gcataagttaccagag

SEQ ID NO: 906 - DNA, 16 bp, Artificial sequence
  Synthetic oligonucleotide
gtatttcgctactgta

SEQ ID NO: 907 - DNA, 16 bp, Artificial sequence
  Synthetic oligonucleotide
cctaagataaaattgc

SEQ ID NO: 908 - DNA, 16 bp, Artificial sequence
  Synthetic oligonucleotide
tggtaaactgtatgcc

SEQ ID NO: 909 - DNA, 16 bp, Artificial sequence
  Synthetic oligonucleotide
gtacagtaggcagttt

SEQ ID NO: 910 - DNA, 16 bp, Artificial sequence
  Synthetic oligonucleotide
aactacttcagttagc

SEQ ID NO: 911 - DNA, 16 bp, Artificial sequence
  Synthetic oligonucleotide
gaagactacattaaca

SEQ ID NO: 912 - DNA, 16 bp, Artificial sequence
  Synthetic oligonucleotide
aaatttcagtacccag

SEQ ID NO: 913 - DNA, 16 bp, Artificial sequence
  Synthetic oligonucleotide
tcttaagagaaggtgc

SEQ ID NO: 914 - DNA, 16 bp, Artificial sequence
  Synthetic oligonucleotide
ccttaacaaacctcca

SEQ ID NO: 915 - DNA, 16 bp, Artificial sequence
  Synthetic oligonucleotide
caattatatgaggtct

SEQ ID NO: 916 - DNA, 16 bp, Artificial sequence
  Synthetic oligonucleotide
gccaattcacatatgt

SEQ ID NO: 917 - DNA, 16 bp, Artificial sequence
  Synthetic oligonucleotide
tatatgttgatgttac

SEQ ID NO: 918 - DNA, 16 bp, Artificial sequence
  Synthetic oligonucleotide
atgataatttggtgtc

SEQ ID NO: 919 - DNA, 16 bp, Artificial sequence
  Synthetic oligonucleotide
tcttaaggatcattgc

SEQ ID NO: 920 - DNA, 16 bp, Artificial sequence
  Synthetic oligonucleotide
ttgtaatcttgaggca

SEQ ID NO: 921 - DNA, 16 bp, Artificial sequence
  Synthetic oligonucleotide
ttattatgaggatctg

SEQ ID NO: 922 - DNA, 16 bp, Artificial sequence
  Synthetic oligonucleotide
aagcagaattgtgaac

SEQ ID NO: 923 - DNA, 16 bp, Artificial sequence
  Synthetic oligonucleotide
cataccacatacccat

SEQ ID NO: 924 - DNA, 16 bp, Artificial sequence
  Synthetic oligonucleotide
cttgactaaggagcta

SEQ ID NO: 925 - DNA, 16 bp, Artificial sequence
  Synthetic oligonucleotide
tcattaagcttagtat

SEQ ID NO: 926 - DNA, 16 bp, Artificial sequence
  Synthetic oligonucleotide
acatagctaactcagg

SEQ ID NO: 927 - DNA, 16 bp, Artificial sequence
  Synthetic oligonucleotide
gtactatagtatttac

SEQ ID NO: 928 - DNA, 16 bp, Artificial sequence
  Synthetic oligonucleotide
tctaagttagccccca

SEQ ID NO: 929 - DNA, 16 bp, Artificial sequence
  Synthetic oligonucleotide
catctacatggatcca

SEQ ID NO: 930 - DNA, 16 bp, Artificial sequence
  Synthetic oligonucleotide
ttaagatgtccaggca

SEQ ID NO: 931 - DNA, 16 bp, Artificial sequence
  Synthetic oligonucleotide
aaggagtatgacaact

SEQ ID NO: 932 - DNA, 16 bp, Artificial sequence
  Synthetic oligonucleotide
cataaagctggattgt

SEQ ID NO: 933 - DNA, 16 bp, Artificial sequence
  Synthetic oligonucleotide
gtaaggagtagtggag

SEQ ID NO: 934 - DNA, 16 bp, Artificial sequence
  Synthetic oligonucleotide
cattaatgccacccta

SEQ ID NO: 935 - DNA, 16 bp, Artificial sequence
  Synthetic oligonucleotide
agtagatttggtagag

SEQ ID NO: 936 - DNA, 16 bp, Artificial sequence
  Synthetic oligonucleotide
gcttatcgagtttagc

SEQ ID NO: 937 - DNA, 16 bp, Artificial sequence
  Synthetic oligonucleotide
gtatagttatcttctc

SEQ ID NO: 938 - DNA, 16 bp, Artificial sequence
  Synthetic oligonucleotide
atactattctccaact

SEQ ID NO: 939 - DNA, 16 bp, Artificial sequence
  Synthetic oligonucleotide
ataagaagagagctca

SEQ ID NO: 940 - DNA, 16 bp, Artificial sequence
  Synthetic oligonucleotide
gtttagctgataggct

SEQ ID NO: 941 - DNA, 16 bp, Artificial sequence
  Synthetic oligonucleotide
tatgagtaaagatcta

SEQ ID NO: 942 - DNA, 16 bp, Artificial sequence
  Synthetic oligonucleotide
gtaatcagttttcctc

SEQ ID NO: 943 - DNA, 16 bp, Artificial sequence
  Synthetic oligonucleotide
gtaaggtaaagtctaa

SEQ ID NO: 944 - DNA, 16 bp, Artificial sequence
  Synthetic oligonucleotide
acataacttcatagtg

SEQ ID NO: 945 - DNA, 16 bp, Artificial sequence
  Synthetic oligonucleotide
cttgtgtagtcctagg

SEQ ID NO: 946 - DNA, 16 bp, Artificial sequence
  Synthetic oligonucleotide
atggtgatcagaagca

SEQ ID NO: 947 - DNA, 16 bp, Artificial sequence
  Synthetic oligonucleotide
acttcaccaacgactc

SEQ ID NO: 948 - DNA, 16 bp, Artificial sequence
  Synthetic oligonucleotide
ttcataagtagtctgc

SEQ ID NO: 949 - DNA, 16 bp, Artificial sequence
  Synthetic oligonucleotide
ttcctccacaccgcgc

SEQ ID NO: 950 - DNA, 16 bp, Artificial sequence
  Synthetic oligonucleotide
acatacgcatgcgcag

SEQ ID NO: 951 - DNA, 16 bp, Artificial sequence
  Synthetic oligonucleotide
cacctgatttagagag

SEQ ID NO: 952 - DNA, 16 bp, Artificial sequence
  Synthetic oligonucleotide
cccagcattattcacc

SEQ ID NO: 953 - DNA, 16 bp, Artificial sequence
  Synthetic oligonucleotide
tgctgagaagatcggc

SEQ ID NO: 954 - DNA, 16 bp, Artificial sequence
  Synthetic oligonucleotide
taggatgttgacctca

SEQ ID NO: 955 - DNA, 16 bp, Artificial sequence
  Synthetic oligonucleotide
tctccatcatcgatgg

SEQ ID NO: 956 - DNA, 16 bp, Artificial sequence
  Synthetic oligonucleotide
ggtaaggaatcccttc

SEQ ID NO: 957 - DNA, 16 bp, Artificial sequence
  Synthetic oligonucleotide
gtcagacctctgtgaa

SEQ ID NO: 958 - DNA, 16 bp, Artificial sequence
  Synthetic oligonucleotide
aacccagtattcacaa

SEQ ID NO: 959 - DNA, 16 bp, Artificial sequence
  Synthetic oligonucleotide
catctgtctccaatac

SEQ ID NO: 960 - DNA, 16 bp, Artificial sequence
  Synthetic oligonucleotide
taagtattccatctat

SEQ ID NO: 961 - DNA, 16 bp, Artificial sequence
  Synthetic oligonucleotide
taaaatcgctgaggcg

SEQ ID NO: 962 - DNA, 16 bp, Artificial sequence
  Synthetic oligonucleotide
gtggccaaccactgct

SEQ ID NO: 963 - DNA, 16 bp, Artificial sequence
  Synthetic oligonucleotide
tcatgcatacatctct

SEQ ID NO: 964 - DNA, 16 bp, Artificial sequence
  Synthetic oligonucleotide
atattatcaggactga

SEQ ID NO: 965 - DNA, 16 bp, Artificial sequence
  Synthetic oligonucleotide
cgtaaatattcttgag

SEQ ID NO: 966 - DNA, 16 bp, Artificial sequence
  Synthetic oligonucleotide
tacttttagggaggta

SEQ ID NO: 967 - DNA, 16 bp, Artificial sequence
  Synthetic oligonucleotide
atgctacttgaacagt

SEQ ID NO: 968 - DNA, 16 bp, Artificial sequence
  Synthetic oligonucleotide
atattctgtggcatgg

SEQ ID NO: 969 - DNA, 16 bp, Artificial sequence
  Synthetic oligonucleotide
ctgctgaaacttgatc

SEQ ID NO: 970 - DNA, 16 bp, Artificial sequence
  Synthetic oligonucleotide
gaggctagggaaatct

SEQ ID NO: 971 - DNA, 16 bp, Artificial sequence
  Synthetic oligonucleotide
gtaataaagtccagaa

SEQ ID NO: 972 - DNA, 16 bp, Artificial sequence
  Synthetic oligonucleotide
atatagagggtccact

SEQ ID NO: 973 - DNA, 16 bp, Artificial sequence
  Synthetic oligonucleotide
ttaaaatagagtcggt

SEQ ID NO: 974 - DNA, 16 bp, Artificial sequence
  Synthetic oligonucleotide
ttgagcctaaaattgt

SEQ ID NO: 975 - DNA, 16 bp, Artificial sequence
  Synthetic oligonucleotide
ggtccattgtttctta

SEQ ID NO: 976 - DNA, 16 bp, Artificial sequence
  Synthetic oligonucleotide
cttgatgtagtgggag

SEQ ID NO: 977 - DNA, 16 bp, Artificial sequence
  Synthetic oligonucleotide
aactacaagaggttat

SEQ ID NO: 978 - DNA, 16 bp, Artificial sequence
  Synthetic oligonucleotide
acatatacagactaag

SEQ ID NO: 979 - DNA, 16 bp, Artificial sequence
  Synthetic oligonucleotide
ctaagttattatcccc

SEQ ID NO: 980 - DNA, 16 bp, Artificial sequence
  Synthetic oligonucleotide
gtatagtattcttcac

SEQ ID NO: 981 - DNA, 16 bp, Artificial sequence
  Synthetic oligonucleotide
catttttaatacgact

SEQ ID NO: 982 - DNA, 16 bp, Artificial sequence
  Synthetic oligonucleotide
gcataagagccaaact

SEQ ID NO: 983 - DNA, 16 bp, Artificial sequence
  Synthetic oligonucleotide
agcataagttaccaga

SEQ ID NO: 984 - DNA, 16 bp, Artificial sequence
  Synthetic oligonucleotide
ttgtatttcgctactg

SEQ ID NO: 985 - DNA, 16 bp, Artificial sequence
  Synthetic oligonucleotide
cctaaattcaaagacc

SEQ ID NO: 986 - DNA, 16 bp, Artificial sequence
  Synthetic oligonucleotide
gtaatggtaaactgta

SEQ ID NO: 987 - DNA, 16 bp, Artificial sequence
  Synthetic oligonucleotide
tgagattacccctggc

SEQ ID NO: 988 - DNA, 16 bp, Artificial sequence
  Synthetic oligonucleotide
cataactacttcagtt

SEQ ID NO: 989 - DNA, 16 bp, Artificial sequence
  Synthetic oligonucleotide
cttagttcattgtgat

SEQ ID NO: 990 - DNA, 16 bp, Artificial sequence
  Synthetic oligonucleotide
ctaaatttcagtaccc

SEQ ID NO: 991 - DNA, 16 bp, Artificial sequence
  Synthetic oligonucleotide
atcttaagagaaggtg

SEQ ID NO: 992 - DNA, 16 bp, Artificial sequence
  Synthetic oligonucleotide
cccttaacaaacctcc

SEQ ID NO: 993 - DNA, 16 bp, Artificial sequence
  Synthetic oligonucleotide
aaccaattatatgagg

SEQ ID NO: 994 - DNA, 16 bp, Artificial sequence
  Synthetic oligonucleotide
gtgtagtttggtgggc

SEQ ID NO: 995 - DNA, 16 bp, Artificial sequence
  Synthetic oligonucleotide
cctatttgtaatattg

SEQ ID NO: 996 - DNA, 16 bp, Artificial sequence
  Synthetic oligonucleotide
ttatgataatttggtg

SEQ ID NO: 997 - DNA, 16 bp, Artificial sequence
  Synthetic oligonucleotide
atcttaaggatcattg

SEQ ID NO: 998 - DNA, 16 bp, Artificial sequence
  Synthetic oligonucleotide
gcattgtaatcttgag

SEQ ID NO: 999 - DNA, 16 bp, Artificial sequence
  Synthetic oligonucleotide
tttattatgaggatct

SEQ ID NO: 1000 - DNA, 16 bp, Artificial sequence
  Synthetic oligonucleotide
ttaagcagaattgtga

SEQ ID NO: 1001 - DNA, 16 bp, Artificial sequence
  Synthetic oligonucleotide
atcataccacataccc

SEQ ID NO: 1002 - DNA, 16 bp, Artificial sequence
  Synthetic oligonucleotide
gcagaaattcaccttg

SEQ ID NO: 1003 - DNA, 16 bp, Artificial sequence
  Synthetic oligonucleotide
gaatcattaagcttag

SEQ ID NO: 1004 - DNA, 16 bp, Artificial sequence
  Synthetic oligonucleotide
ccacatagctaactca

SEQ ID NO: 1005 - DNA, 16 bp, Artificial sequence
  Synthetic oligonucleotide
caatagtactatagta

SEQ ID NO: 1006 - DNA, 16 bp, Artificial sequence
  Synthetic oligonucleotide
ctctaagttagccccc

SEQ ID NO: 1007 - DNA, 16 bp, Artificial sequence
  Synthetic oligonucleotide
aattactccgttctgc

SEQ ID NO: 1008 - DNA, 16 bp, Artificial sequence
  Synthetic oligonucleotide
attaagatgtccaggc

SEQ ID NO: 1009 - DNA, 16 bp, Artificial sequence
  Synthetic oligonucleotide
caaggagtatgacaac

SEQ ID NO: 1010 - DNA, 16 bp, Artificial sequence
  Synthetic oligonucleotide
tccataaagctggatt

SEQ ID NO: 1011 - DNA, 16 bp, Artificial sequence
  Synthetic oligonucleotide
tggtaaggagtagtgg

SEQ ID NO: 1012 - DNA, 16 bp, Artificial sequence
  Synthetic oligonucleotide
gcattaatgccaccct

SEQ ID NO: 1013 - DNA, 16 bp, Artificial sequence
  Synthetic oligonucleotide
cagtagatttggtaga

SEQ ID NO: 1014 - DNA, 16 bp, Artificial sequence
  Synthetic oligonucleotide
agcttatcgagtttag

SEQ ID NO: 1015 - DNA, 16 bp, Artificial sequence
  Synthetic oligonucleotide
agtatagttatcttct

SEQ ID NO: 1016 - DNA, 16 bp, Artificial sequence
  Synthetic oligonucleotide
gatactattctccaac

SEQ ID NO: 1017 - DNA, 16 bp, Artificial sequence
  Synthetic oligonucleotide
gataagaagagagctc

SEQ ID NO: 1018 - DNA, 16 bp, Artificial sequence
  Synthetic oligonucleotide
atattgtttagctgat

SEQ ID NO: 1019 - DNA, 16 bp, Artificial sequence
  Synthetic oligonucleotide
gatatgagtaaagatc

SEQ ID NO: 1020 - DNA, 16 bp, Artificial sequence
  Synthetic oligonucleotide
gagtaatcagttttcc

SEQ ID NO: 1021 - DNA, 16 bp, Artificial sequence
  Synthetic oligonucleotide
agtaaggtaaagtcta

SEQ ID NO: 1022 - DNA, 16 bp, Artificial sequence
  Synthetic oligonucleotide
tgacataacttcatag

SEQ ID NO: 1023 - DNA, 16 bp, Artificial sequence
  Synthetic oligonucleotide
ccttgtgtagtcctag

SEQ ID NO: 1024 - DNA, 16 bp, Artificial sequence
  Synthetic oligonucleotide
gatggtgatcagaagc

SEQ ID NO: 1025 - DNA, 16 bp, Artificial sequence
  Synthetic oligonucleotide
aacttcaccaacgact

SEQ ID NO: 1026 - DNA, 16 bp, Artificial sequence
  Synthetic oligonucleotide
attcataagtagtctg

SEQ ID NO: 1027 - DNA, 16 bp, Artificial sequence
  Synthetic oligonucleotide
tttcctccacaccgcg

SEQ ID NO: 1028 - DNA, 16 bp, Artificial sequence
  Synthetic oligonucleotide
cacatacgcatgcgca

SEQ ID NO: 1029 - DNA, 16 bp, Artificial sequence
  Synthetic oligonucleotide
tcacctgatttagaga

SEQ ID NO: 1030 - DNA, 16 bp, Artificial sequence
  Synthetic oligonucleotide
gtcccagcattattca

SEQ ID NO: 1031 - DNA, 16 bp, Artificial sequence
  Synthetic oligonucleotide
gtgctgagaagatcgg

SEQ ID NO: 1032 - DNA, 16 bp, Artificial sequence
  Synthetic oligonucleotide
ctaggatgttgacctc

SEQ ID NO: 1033 - DNA, 16 bp, Artificial sequence
  Synthetic oligonucleotide
ctctccatcatcgatg

SEQ ID NO: 1034 - DNA, 16 bp, Artificial sequence
  Synthetic oligonucleotide
aggtaaggaatccctt

SEQ ID NO: 1035 - DNA, 16 bp, Artificial sequence
  Synthetic oligonucleotide
tgtcagacctctgtga

SEQ ID NO: 1036 - DNA, 16 bp, Artificial sequence
  Synthetic oligonucleotide
gaacccagtattcaca

SEQ ID NO: 1037 - DNA, 16 bp, Artificial sequence
  Synthetic oligonucleotide
cgacttcatctgtctc

SEQ ID NO: 1038 - DNA, 16 bp, Artificial sequence
  Synthetic oligonucleotide
gtaagtattccatcta

SEQ ID NO: 1039 - DNA, 16 bp, Artificial sequence
  Synthetic oligonucleotide
ttaaaatcgctgaggc

SEQ ID NO: 1040 - DNA, 16 bp, Artificial sequence
  Synthetic oligonucleotide
tgtggccaaccactgc

SEQ ID NO: 1041 - DNA, 16 bp, Artificial sequence
  Synthetic oligonucleotide
atcatgcatacatctc

SEQ ID NO: 1042 - DNA, 16 bp, Artificial sequence
  Synthetic oligonucleotide
gtgccaaaccaatgtt

SEQ ID NO: 1043 - DNA, 16 bp, Artificial sequence
  Synthetic oligonucleotide
cctatgaaaaactacg

SEQ ID NO: 1044 - DNA, 16 bp, Artificial sequence
  Synthetic oligonucleotide
gtatttacttttaggg

SEQ ID NO: 1045 - DNA, 16 bp, Artificial sequence
  Synthetic oligonucleotide
aatgctacttgaacag

SEQ ID NO: 1046 - DNA, 16 bp, Artificial sequence
  Synthetic oligonucleotide
gatattctgtggcatg

SEQ ID NO: 1047 - DNA, 16 bp, Artificial sequence
  Synthetic oligonucleotide
cctgctgaaacttgat

SEQ ID NO: 1048 - DNA, 16 bp, Artificial sequence
  Synthetic oligonucleotide
agaggctagggaaatc

SEQ ID NO: 1049 - DNA, 16 bp, Artificial sequence
  Synthetic oligonucleotide
agtaataaagtccaga

SEQ ID NO: 1050 - DNA, 16 bp, Artificial sequence
  Synthetic oligonucleotide
aatatagagggtccac

SEQ ID NO: 1051 - DNA, 16 bp, Artificial sequence
  Synthetic oligonucleotide
tttaaaatagagtcgg

SEQ ID NO: 1052 - DNA, 16 bp, Artificial sequence
  Synthetic oligonucleotide
tttgagcctaaaattg

SEQ ID NO: 1053 - DNA, 16 bp, Artificial sequence
  Synthetic oligonucleotide
gggtccattgtttctt

SEQ ID NO: 1054 - DNA, 16 bp, Artificial sequence
  Synthetic oligonucleotide
tcttgatgtagtggga

SEQ ID NO: 1055 - DNA, 16 bp, Artificial sequence
  Synthetic oligonucleotide
taactacaagaggtta

SEQ ID NO: 1056 - DNA, 16 bp, Artificial sequence
  Synthetic oligonucleotide
aactaacctgacacat

SEQ ID NO: 1057 - DNA, 16 bp, Artificial sequence
  Synthetic oligonucleotide
cctaagttattatccc

SEQ ID NO: 1058 - DNA, 16 bp, Artificial sequence
  Synthetic oligonucleotide
atacatcaactcctct

SEQ ID NO: 1059 - DNA, 16 bp, Artificial sequence
  Synthetic oligonucleotide
tcatttttaatacgac

SEQ ID NO: 1060 - DNA, 16 bp, Artificial sequence
  Synthetic oligonucleotide
tgcataagagccaaac

SEQ ID NO: 1061 - DNA, 16 bp, Artificial sequence
  Synthetic oligonucleotide
gagcataagttaccag

SEQ ID NO: 1062 - DNA, 16 bp, Artificial sequence
  Synthetic oligonucleotide
cttgaatgagtggtct

SEQ ID NO: 1063 - DNA, 16 bp, Artificial sequence
  Synthetic oligonucleotide
caatttactttcagcc

SEQ ID NO: 1064 - DNA, 16 bp, Artificial sequence
  Synthetic oligonucleotide
aactagtggtaatggt

SEQ ID NO: 1065 - DNA, 16 bp, Artificial sequence
  Synthetic oligonucleotide
gcaatgagattacccc

SEQ ID NO: 1066 - DNA, 16 bp, Artificial sequence
  Synthetic oligonucleotide
acataactacttcagt

SEQ ID NO: 1067 - DNA, 16 bp, Artificial sequence
  Synthetic oligonucleotide
gcttagttcattgtga

SEQ ID NO: 1068 - DNA, 16 bp, Artificial sequence
  Synthetic oligonucleotide
gggataaactgttctt

SEQ ID NO: 1069 - DNA, 16 bp, Artificial sequence
  Synthetic oligonucleotide
tatcttaagagaaggt

SEQ ID NO: 1070 - DNA, 16 bp, Artificial sequence
  Synthetic oligonucleotide
acccttaacaaacctc

SEQ ID NO: 1071 - DNA, 16 bp, Artificial sequence
  Synthetic oligonucleotide
taaccaattatatgag

SEQ ID NO: 1072 - DNA, 16 bp, Artificial sequence
  Synthetic oligonucleotide
ctccgtgtagtttggt

SEQ ID NO: 1073 - DNA, 16 bp, Artificial sequence
  Synthetic oligonucleotide
gaattcactatctccc

SEQ ID NO: 1074 - DNA, 16 bp, Artificial sequence
  Synthetic oligonucleotide
cttatgataatttggt

SEQ ID NO: 1075 - DNA, 16 bp, Artificial sequence
  Synthetic oligonucleotide
gatcttaaggatcatt

SEQ ID NO: 1076 - DNA, 16 bp, Artificial sequence
  Synthetic oligonucleotide
taaatccaaatcactc

SEQ ID NO: 1077 - DNA, 16 bp, Artificial sequence
  Synthetic oligonucleotide
ttttattatgaggatc

SEQ ID NO: 1078 - DNA, 16 bp, Artificial sequence
  Synthetic oligonucleotide
attaagcagaattgtg

SEQ ID NO: 1079 - DNA, 16 bp, Artificial sequence
  Synthetic oligonucleotide
ttatcataccacatac

SEQ ID NO: 1080 - DNA, 16 bp, Artificial sequence
  Synthetic oligonucleotide
caagagttcttgcaga

SEQ ID NO: 1081 - DNA, 16 bp, Artificial sequence
  Synthetic oligonucleotide
tcgaatcattaagctt

SEQ ID NO: 1082 - DNA, 16 bp, Artificial sequence
  Synthetic oligonucleotide
accacatagctaactc

SEQ ID NO: 1083 - DNA, 16 bp, Artificial sequence
  Synthetic oligonucleotide
gcaatagtactatagt

SEQ ID NO: 1084 - DNA, 16 bp, Artificial sequence
  Synthetic oligonucleotide
cctctaagttagcccc

SEQ ID NO: 1085 - DNA, 16 bp, Artificial sequence
  Synthetic oligonucleotide
aaattactccgttctg

SEQ ID NO: 1086 - DNA, 16 bp, Artificial sequence
  Synthetic oligonucleotide
tcaaattaagatgtcc

SEQ ID NO: 1087 - DNA, 16 bp, Artificial sequence
  Synthetic oligonucleotide
tgagaatttaagaggg

SEQ ID NO: 1088 - DNA, 16 bp, Artificial sequence
  Synthetic oligonucleotide
gtattccataaagctg

SEQ ID NO: 1089 - DNA, 16 bp, Artificial sequence
  Synthetic oligonucleotide
atggtaaggagtagtg

SEQ ID NO: 1090 - DNA, 16 bp, Artificial sequence
  Synthetic oligonucleotide
tgcattaatgccaccc

SEQ ID NO: 1091 - DNA, 16 bp, Artificial sequence
  Synthetic oligonucleotide
gacagtagatttggta

SEQ ID NO: 1092 - DNA, 16 bp, Artificial sequence
  Synthetic oligonucleotide
aagcttatcgagttta

SEQ ID NO: 1093 - DNA, 16 bp, Artificial sequence
  Synthetic oligonucleotide
tagtatagttatcttc

SEQ ID NO: 1094 - DNA, 16 bp, Artificial sequence
  Synthetic oligonucleotide
tgggatactattctcc

SEQ ID NO: 1095 - DNA, 16 bp, Artificial sequence
  Synthetic oligonucleotide
ggataagaagagagct

SEQ ID NO: 1096 - DNA, 16 bp, Artificial sequence
  Synthetic oligonucleotide
gatattgtttagctga

SEQ ID NO: 1097 - DNA, 16 bp, Artificial sequence
  Synthetic oligonucleotide
ctgatatgagtaaaga

SEQ ID NO: 1098 - DNA, 16 bp, Artificial sequence
  Synthetic oligonucleotide
gagagtaatcagtttt

SEQ ID NO: 1099 - DNA, 16 bp, Artificial sequence
  Synthetic oligonucleotide
aagtaaggtaaagtct

SEQ ID NO: 1100 - DNA, 16 bp, Artificial sequence
  Synthetic oligonucleotide
tttaactttcctccgt

SEQ ID NO: 1101 - DNA, 16 bp, Artificial sequence
  Synthetic oligonucleotide
tccttgtgtagtccta

SEQ ID NO: 1102 - DNA, 16 bp, Artificial sequence
  Synthetic oligonucleotide
tgatggtgatcagaag

SEQ ID NO: 1103 - DNA, 16 bp, Artificial sequence
  Synthetic oligonucleotide
aaacttcaccaacgac

SEQ ID NO: 1104 - DNA, 16 bp, Artificial sequence
  Synthetic oligonucleotide
aattcataagtagtct

SEQ ID NO: 1105 - DNA, 16 bp, Artificial sequence
  Synthetic oligonucleotide
gtttcctccacaccgc

SEQ ID NO: 1106 - DNA, 16 bp, Artificial sequence
  Synthetic oligonucleotide
ccacatacgcatgcgc

SEQ ID NO: 1107 - DNA, 16 bp, Artificial sequence
  Synthetic oligonucleotide
ttcacctgatttagag

SEQ ID NO: 1108 - DNA, 16 bp, Artificial sequence
  Synthetic oligonucleotide
tgtcccagcattattc

SEQ ID NO: 1109 - DNA, 16 bp, Artificial sequence
  Synthetic oligonucleotide
ggtgctgagaagatcg

SEQ ID NO: 1110 - DNA, 16 bp, Artificial sequence
  Synthetic oligonucleotide
cctaggatgttgacct

SEQ ID NO: 1111 - DNA, 16 bp, Artificial sequence
  Synthetic oligonucleotide
tctctccatcatcgat

SEQ ID NO: 1112 - DNA, 16 bp, Artificial sequence
  Synthetic oligonucleotide
gaggtaaggaatccct

SEQ ID NO: 1113 - DNA, 16 bp, Artificial sequence
  Synthetic oligonucleotide
atgtcagacctctgtg

SEQ ID NO: 1114 - DNA, 16 bp, Artificial sequence
  Synthetic oligonucleotide
tgaacccagtattcac

SEQ ID NO: 1115 - DNA, 16 bp, Artificial sequence
  Synthetic oligonucleotide
acgacttcatctgtct

SEQ ID NO: 1116 - DNA, 16 bp, Artificial sequence
  Synthetic oligonucleotide
ggtaagtattccatct

SEQ ID NO: 1117 - DNA, 16 bp, Artificial sequence
  Synthetic oligonucleotide
tttaaaatcgctgagg

SEQ ID NO: 1118 - DNA, 16 bp, Artificial sequence
  Synthetic oligonucleotide
ttgtggccaaccactg

SEQ ID NO: 1119 - DNA, 16 bp, Artificial sequence
  Synthetic oligonucleotide
tatcatgcatacatct

SEQ ID NO: 1120 - DNA, 16 bp, Artificial sequence
  Synthetic oligonucleotide
agtgccaaaccaatgt

SEQ ID NO: 1121 - DNA, 16 bp, Artificial sequence
  Synthetic oligonucleotide
cagacctatgaaaaac

SEQ ID NO: 1122 - DNA, 16 bp, Artificial sequence
  Synthetic oligonucleotide
gtgtaaataagttctc

SEQ ID NO: 1123 - DNA, 16 bp, Artificial sequence
  Synthetic oligonucleotide
gaatgctacttgaaca

SEQ ID NO: 1124 - DNA, 16 bp, Artificial sequence
  Synthetic oligonucleotide
tgatattctgtggcat

SEQ ID NO: 1125 - DNA, 16 bp, Artificial sequence
  Synthetic oligonucleotide
gcctgctgaaacttga

SEQ ID NO: 1126 - DNA, 16 bp, Artificial sequence
  Synthetic oligonucleotide
gggctaatgaaaaagg

SEQ ID NO: 1127 - DNA, 16 bp, Artificial sequence
  Synthetic oligonucleotide
tcaagtaataaagtcc

SEQ ID NO: 1128 - DNA, 16 bp, Artificial sequence
  Synthetic oligonucleotide
aaatatagagggtcca

SEQ ID NO: 1129 - DNA, 16 bp, Artificial sequence
  Synthetic oligonucleotide
atttaaaatagagtcg

SEQ ID NO: 1130 - DNA, 16 bp, Artificial sequence
  Synthetic oligonucleotide
taatttttgagcctaa

SEQ ID NO: 1131 - DNA, 16 bp, Artificial sequence
  Synthetic oligonucleotide
tgggtccattgtttct

SEQ ID NO: 1132 - DNA, 16 bp, Artificial sequence
  Synthetic oligonucleotide
gtcttgatgtagtggg

SEQ ID NO: 1133 - DNA, 16 bp, Artificial sequence
  Synthetic oligonucleotide
ataactacaagaggtt

SEQ ID NO: 1134 - DNA, 16 bp, Artificial sequence
  Synthetic oligonucleotide
taactaacctgacaca

SEQ ID NO: 1135 - DNA, 16 bp, Artificial sequence
  Synthetic oligonucleotide
ccctaagttattatcc

SEQ ID NO: 1136 - DNA, 16 bp, Artificial sequence
  Synthetic oligonucleotide
tatacatcaactcctc

SEQ ID NO: 1137 - DNA, 16 bp, Artificial sequence
  Synthetic oligonucleotide
agtcatttttaatacg

SEQ ID NO: 1138 - DNA, 16 bp, Artificial sequence
  Synthetic oligonucleotide
ttgcataagagccaaa

SEQ ID NO: 1139 - DNA, 16 bp, Artificial sequence
  Synthetic oligonucleotide
tagttggtagcttgct

SEQ ID NO: 1140 - DNA, 16 bp, Artificial sequence
  Synthetic oligonucleotide
accttgaatgagtggt

SEQ ID NO: 1141 - DNA, 16 bp, Artificial sequence
  Synthetic oligonucleotide
gcaatttactttcagc

SEQ ID NO: 1142 - DNA, 16 bp, Artificial sequence
  Synthetic oligonucleotide
tctaaactagtggtaa

SEQ ID NO: 1143 - DNA, 16 bp, Artificial sequence
  Synthetic oligonucleotide
ttgcaatgagattacc

SEQ ID NO: 1144 - DNA, 16 bp, Artificial sequence
  Synthetic oligonucleotide
gacataactacttcag

SEQ ID NO: 1145 - DNA, 16 bp, Artificial sequence
  Synthetic oligonucleotide
tttgttagagtgctta

SEQ ID NO: 1146 - DNA, 16 bp, Artificial sequence
  Synthetic oligonucleotide
cataaaggtgggataa

SEQ ID NO: 1147 - DNA, 16 bp, Artificial sequence
  Synthetic oligonucleotide
gtatcttaagagaagg

SEQ ID NO: 1148 - DNA, 16 bp, Artificial sequence
  Synthetic oligonucleotide
aaagatgtacactgac

SEQ ID NO: 1149 - DNA, 16 bp, Artificial sequence
  Synthetic oligonucleotide
ctaaccaattatatga

SEQ ID NO: 1150 - DNA, 16 bp, Artificial sequence
  Synthetic oligonucleotide
aatgtatgaggtctcc

SEQ ID NO: 1151 - DNA, 16 bp, Artificial sequence
  Synthetic oligonucleotide
gattgaattcactatc

SEQ ID NO: 1152 - DNA, 16 bp, Artificial sequence
  Synthetic oligonucleotide
ccttatgataatttgg

SEQ ID NO: 1153 - DNA, 16 bp, Artificial sequence
  Synthetic oligonucleotide
tgatcttaaggatcat

SEQ ID NO: 1154 - DNA, 16 bp, Artificial sequence
  Synthetic oligonucleotide
cattctaaactactat

SEQ ID NO: 1155 - DNA, 16 bp, Artificial sequence
  Synthetic oligonucleotide
gacaatggttgccact

SEQ ID NO: 1156 - DNA, 16 bp, Artificial sequence
  Synthetic oligonucleotide
gattaagcagaattgt

SEQ ID NO: 1157 - DNA, 16 bp, Artificial sequence
  Synthetic oligonucleotide
caatttatcataccac

SEQ ID NO: 1158 - DNA, 16 bp, Artificial sequence
  Synthetic oligonucleotide
acaagagttcttgcag

SEQ ID NO: 1159 - DNA, 16 bp, Artificial sequence
  Synthetic oligonucleotide
ttcgaatcattaagct

SEQ ID NO: 1160 - DNA, 16 bp, Artificial sequence
  Synthetic oligonucleotide
caccatgaaggactcc

SEQ ID NO: 1161 - DNA, 16 bp, Artificial sequence
  Synthetic oligonucleotide
tgcaatagtactatag

SEQ ID NO: 1162 - DNA, 16 bp, Artificial sequence
  Synthetic oligonucleotide
atttagcattgcctgt

SEQ ID NO: 1163 - DNA, 16 bp, Artificial sequence
  Synthetic oligonucleotide
taaattactccgttct

SEQ ID NO: 1164 - DNA, 16 bp, Artificial sequence
  Synthetic oligonucleotide
gtgcaagatgatgaca

SEQ ID NO: 1165 - DNA, 16 bp, Artificial sequence
  Synthetic oligonucleotide
gtatttgagattcacc

SEQ ID NO: 1166 - DNA, 16 bp, Artificial sequence
  Synthetic oligonucleotide
gctaagtatactttct

SEQ ID NO: 1167 - DNA, 16 bp, Artificial sequence
  Synthetic oligonucleotide
gatggtaaggagtagt

SEQ ID NO: 1168 - DNA, 16 bp, Artificial sequence
  Synthetic oligonucleotide
ctgcattaatgccacc

SEQ ID NO: 1169 - DNA, 16 bp, Artificial sequence
  Synthetic oligonucleotide
caaagtttgggcagag

SEQ ID NO: 1170 - DNA, 16 bp, Artificial sequence
  Synthetic oligonucleotide
aaaaagcttatcgagt

SEQ ID NO: 1171 - DNA, 16 bp, Artificial sequence
  Synthetic oligonucleotide
gttagtatagttatct

SEQ ID NO: 1172 - DNA, 16 bp, Artificial sequence
  Synthetic oligonucleotide
tttactgggatactat

SEQ ID NO: 1173 - DNA, 16 bp, Artificial sequence
  Synthetic oligonucleotide
agggaagatctggctg

SEQ ID NO: 1174 - DNA, 16 bp, Artificial sequence
  Synthetic oligonucleotide
agctattgtctttgat

SEQ ID NO: 1175 - DNA, 16 bp, Artificial sequence
  Synthetic oligonucleotide
ctcttatctgatatga

SEQ ID NO: 1176 - DNA, 16 bp, Artificial sequence
  Synthetic oligonucleotide
gcattaaaactctcat

SEQ ID NO: 1177 - DNA, 16 bp, Artificial sequence
  Synthetic oligonucleotide
caagtaaggtaaagtc

SEQ ID NO: 1178 - DNA, 16 bp, Artificial sequence
  Synthetic oligonucleotide
gtttaactttcctccg

SEQ ID NO: 1179 - DNA, 16 bp, Artificial sequence
  Synthetic oligonucleotide
gtccttgtgtagtcct

SEQ ID NO: 1180 - DNA, 16 bp, Artificial sequence
  Synthetic oligonucleotide
gtagatgatggtgatc

SEQ ID NO: 1181 - DNA, 16 bp, Artificial sequence
  Synthetic oligonucleotide
aaaacttcaccaacga

SEQ ID NO: 1182 - DNA, 16 bp, Artificial sequence
  Synthetic oligonucleotide
ccaatatgctctgtcg

SEQ ID NO: 1183 - DNA, 16 bp, Artificial sequence
  Synthetic oligonucleotide
agtttcctccacaccg

SEQ ID NO: 1184 - DNA, 16 bp, Artificial sequence
  Synthetic oligonucleotide
accacatacgcatgcg

SEQ ID NO: 1185 - DNA, 16 bp, Artificial sequence
  Synthetic oligonucleotide
cttcacctgatttaga

SEQ ID NO: 1186 - DNA, 16 bp, Artificial sequence
  Synthetic oligonucleotide
actgtcccagcattat

SEQ ID NO: 1187 - DNA, 16 bp, Artificial sequence
  Synthetic oligonucleotide
atccttggtgctgaga

SEQ ID NO: 1188 - DNA, 16 bp, Artificial sequence
  Synthetic oligonucleotide
tcctaggatgttgacc

SEQ ID NO: 1189 - DNA, 16 bp, Artificial sequence
  Synthetic oligonucleotide
ttctctccatcatcga

SEQ ID NO: 1190 - DNA, 16 bp, Artificial sequence
  Synthetic oligonucleotide
tgaggtaaggaatccc

SEQ ID NO: 1191 - DNA, 16 bp, Artificial sequence
  Synthetic oligonucleotide
gatgtcagacctctgt

SEQ ID NO: 1192 - DNA, 16 bp, Artificial sequence
  Synthetic oligonucleotide
gtgaacccagtattca

SEQ ID NO: 1193 - DNA, 16 bp, Artificial sequence
  Synthetic oligonucleotide
tacgacttcatctgtc

SEQ ID NO: 1194 - DNA, 16 bp, Artificial sequence
  Synthetic oligonucleotide
tggtaagtattccatc

SEQ ID NO: 1195 - DNA, 16 bp, Artificial sequence
  Synthetic oligonucleotide
atttaaaatcgctgag

SEQ ID NO: 1196 - DNA, 16 bp, Artificial sequence
  Synthetic oligonucleotide
tttgtggccaaccact

SEQ ID NO: 1197 - DNA, 16 bp, Artificial sequence
  Synthetic oligonucleotide
ttatcatgcatacatc

SEQ ID NO: 1198 - DNA, 16 bp, Artificial sequence
  Synthetic oligonucleotide
tagtgccaaaccaatg

SEQ ID NO: 1199 - DNA, 16 bp, Artificial sequence
  Synthetic oligonucleotide
gtttttaagaggcatg

SEQ ID NO: 1200 - DNA, 16 bp, Artificial sequence
  Synthetic oligonucleotide
ctgtgtaaataagttc

SEQ ID NO: 1201 - DNA, 16 bp, Artificial sequence
  Synthetic oligonucleotide
ggaatgctacttgaac

SEQ ID NO: 1202 - DNA, 16 bp, Artificial sequence
  Synthetic oligonucleotide
ttgatattctgtggca

SEQ ID NO: 1203 - DNA, 16 bp, Artificial sequence
  Synthetic oligonucleotide
tgcctgctgaaacttg

SEQ ID NO: 1204 - DNA, 16 bp, Artificial sequence
  Synthetic oligonucleotide
gttttgggctaatgaa

SEQ ID NO: 1205 - DNA, 16 bp, Artificial sequence
  Synthetic oligonucleotide
gttatacagaagacag

SEQ ID NO: 1206 - DNA, 16 bp, Artificial sequence
  Synthetic oligonucleotide
gaaatatagagggtcc

SEQ ID NO: 1207 - DNA, 16 bp, Artificial sequence
  Synthetic oligonucleotide
gggctagaacttaaaa

SEQ ID NO: 1208 - DNA, 16 bp, Artificial sequence
  Synthetic oligonucleotide
gctttaatttttgagc

SEQ ID NO: 1209 - DNA, 16 bp, Artificial sequence
  Synthetic oligonucleotide
ttgggtccattgtttc

SEQ ID NO: 1210 - DNA, 16 bp, Artificial sequence
  Synthetic oligonucleotide
agtcttgatgtagtgg

SEQ ID NO: 1211 - DNA, 16 bp, Artificial sequence
  Synthetic oligonucleotide
tataactacaagaggt

SEQ ID NO: 1212 - DNA, 16 bp, Artificial sequence
  Synthetic oligonucleotide
ctaactaacctgacac

SEQ ID NO: 1213 - DNA, 16 bp, Artificial sequence
  Synthetic oligonucleotide
taattttcagatcccg

SEQ ID NO: 1214 - DNA, 16 bp, Artificial sequence
  Synthetic oligonucleotide
atatacatcaactcct

SEQ ID NO: 1215 - DNA, 16 bp, Artificial sequence
  Synthetic oligonucleotide
gaatttttgaggttgg

SEQ ID NO: 1216 - DNA, 16 bp, Artificial sequence
  Synthetic oligonucleotide
ttagattgcataagag

SEQ ID NO: 1217 - DNA, 16 bp, Artificial sequence
  Synthetic oligonucleotide
tttagttggtagcttg

SEQ ID NO: 1218 - DNA, 16 bp, Artificial sequence
  Synthetic oligonucleotide
aaccttgaatgagtgg

SEQ ID NO: 1219 - DNA, 16 bp, Artificial sequence
  Synthetic oligonucleotide
cataggacatggagac

SEQ ID NO: 1220 - DNA, 16 bp, Artificial sequence
  Synthetic oligonucleotide
attctaaactagtggt

SEQ ID NO: 1221 - DNA, 16 bp, Artificial sequence
  Synthetic oligonucleotide
ctccttatttgttaga

SEQ ID NO: 1222 - DNA, 16 bp, Artificial sequence
  Synthetic oligonucleotide
tgacataactacttca

SEQ ID NO: 1223 - DNA, 16 bp, Artificial sequence
  Synthetic oligonucleotide
aaagtttgttagagtg

SEQ ID NO: 1224 - DNA, 16 bp, Artificial sequence
  Synthetic oligonucleotide
tcataaaggtgggata

SEQ ID NO: 1225 - DNA, 16 bp, Artificial sequence
  Synthetic oligonucleotide
gttataagtttcatgt

SEQ ID NO: 1226 - DNA, 16 bp, Artificial sequence
  Synthetic oligonucleotide
gcattgaaaagatgta

SEQ ID NO: 1227 - DNA, 16 bp, Artificial sequence
  Synthetic oligonucleotide
tctatacaaaggcagt

SEQ ID NO: 1228 - DNA, 16 bp, Artificial sequence
  Synthetic oligonucleotide
taatgtatgaggtctc

SEQ ID NO: 1229 - DNA, 16 bp, Artificial sequence
  Synthetic oligonucleotide
atgattgaattcacta

SEQ ID NO: 1230 - DNA, 16 bp, Artificial sequence
  Synthetic oligonucleotide
taaacaatattaaggg

SEQ ID NO: 1231 - DNA, 16 bp, Artificial sequence
  Synthetic oligonucleotide
ccaatatgggatgagg

SEQ ID NO: 1232 - DNA, 16 bp, Artificial sequence
  Synthetic oligonucleotide
ttacaacctggtttca

SEQ ID NO: 1233 - DNA, 16 bp, Artificial sequence
  Synthetic oligonucleotide
tgacaatggttgccac

SEQ ID NO: 1234 - DNA, 16 bp, Artificial sequence
  Synthetic oligonucleotide
tgattaagcagaattg

SEQ ID NO: 1235 - DNA, 16 bp, Artificial sequence
  Synthetic oligonucleotide
tcaatttatcatacca

SEQ ID NO: 1236 - DNA, 16 bp, Artificial sequence
  Synthetic oligonucleotide
gacaagagttcttgca

SEQ ID NO: 1237 - DNA, 16 bp, Artificial sequence
  Synthetic oligonucleotide
tttcgaatcattaagc

SEQ ID NO: 1238 - DNA, 16 bp, Artificial sequence
  Synthetic oligonucleotide
acctatggtctaacac

SEQ ID NO: 1239 - DNA, 16 bp, Artificial sequence
  Synthetic oligonucleotide
ttgcaatagtactata

SEQ ID NO: 1240 - DNA, 16 bp, Artificial sequence
  Synthetic oligonucleotide
tatttagcattgcctg

SEQ ID NO: 1241 - DNA, 16 bp, Artificial sequence
  Synthetic oligonucleotide
ctaaattactccgttc

SEQ ID NO: 1242 - DNA, 16 bp, Artificial sequence
  Synthetic oligonucleotide
tagaattgtctgttag

SEQ ID NO: 1243 - DNA, 16 bp, Artificial sequence
  Synthetic oligonucleotide
cgtatttgagattcac

SEQ ID NO: 1244 - DNA, 16 bp, Artificial sequence
  Synthetic oligonucleotide
agctaagtatactttc

SEQ ID NO: 1245 - DNA, 16 bp, Artificial sequence
  Synthetic oligonucleotide
agatggtaaggagtag

SEQ ID NO: 1246 - DNA, 16 bp, Artificial sequence
  Synthetic oligonucleotide
atattccaggatttgc

SEQ ID NO: 1247 - DNA, 16 bp, Artificial sequence
  Synthetic oligonucleotide
gcaaagtttgggcaga

SEQ ID NO: 1248 - DNA, 16 bp, Artificial sequence
  Synthetic oligonucleotide
aaaaaagcttatcgag

SEQ ID NO: 1249 - DNA, 16 bp, Artificial sequence
  Synthetic oligonucleotide
agttagtatagttatc

SEQ ID NO: 1250 - DNA, 16 bp, Artificial sequence
  Synthetic oligonucleotide
aaagactttgagactc

SEQ ID NO: 1251 - DNA, 16 bp, Artificial sequence
  Synthetic oligonucleotide
gaaagatggaatgagc

SEQ ID NO: 1252 - DNA, 16 bp, Artificial sequence
  Synthetic oligonucleotide
aggtaaactaaagtac

SEQ ID NO: 1253 - DNA, 16 bp, Artificial sequence
  Synthetic oligonucleotide
cataccactcttctca

SEQ ID NO: 1254 - DNA, 16 bp, Artificial sequence
  Synthetic oligonucleotide
atgcattaaaactctc

SEQ ID NO: 1255 - DNA, 16 bp, Artificial sequence
  Synthetic oligonucleotide
acaagtaaggtaaagt

SEQ ID NO: 1256 - DNA, 16 bp, Artificial sequence
  Synthetic oligonucleotide
agagttatctggtttg

SEQ ID NO: 1257 - DNA, 16 bp, Artificial sequence
  Synthetic oligonucleotide
agtccttgtgtagtcc

SEQ ID NO: 1258 - DNA, 16 bp, Artificial sequence
  Synthetic oligonucleotide
gagtagatgatggtga

SEQ ID NO: 1259 - DNA, 16 bp, Artificial sequence
  Synthetic oligonucleotide
aaaaacttcaccaacg

SEQ ID NO: 1260 - DNA, 16 bp, Artificial sequence
  Synthetic oligonucleotide
accaatatgctctgtc

SEQ ID NO: 1261 - DNA, 16 bp, Artificial sequence
  Synthetic oligonucleotide
cactcagctgcagttt

SEQ ID NO: 1262 - DNA, 16 bp, Artificial sequence
  Synthetic oligonucleotide
taccacatacgcatgc

SEQ ID NO: 1263 - DNA, 16 bp, Artificial sequence
  Synthetic oligonucleotide
tcttcacctgatttag

SEQ ID NO: 1264 - DNA, 16 bp, Artificial sequence
  Synthetic oligonucleotide
tactgtcccagcatta

SEQ ID NO: 1265 - DNA, 16 bp, Artificial sequence
  Synthetic oligonucleotide
catccttggtgctgag

SEQ ID NO: 1266 - DNA, 16 bp, Artificial sequence
  Synthetic oligonucleotide
gtcctaggatgttgac

SEQ ID NO: 1267 - DNA, 16 bp, Artificial sequence
  Synthetic oligonucleotide
tttctctccatcatcg

SEQ ID NO: 1268 - DNA, 16 bp, Artificial sequence
  Synthetic oligonucleotide
atgaggtaaggaatcc

SEQ ID NO: 1269 - DNA, 16 bp, Artificial sequence
  Synthetic oligonucleotide
ctgatgtcagacctct

SEQ ID NO: 1270 - DNA, 16 bp, Artificial sequence
  Synthetic oligonucleotide
ggtgaacccagtattc

SEQ ID NO: 1271 - DNA, 16 bp, Artificial sequence
  Synthetic oligonucleotide
ttacgacttcatctgt

SEQ ID NO: 1272 - DNA, 16 bp, Artificial sequence
  Synthetic oligonucleotide
tattggtaagtattcc

SEQ ID NO: 1273 - DNA, 16 bp, Artificial sequence
  Synthetic oligonucleotide
gatttaaaatcgctga

SEQ ID NO: 1274 - DNA, 16 bp, Artificial sequence
  Synthetic oligonucleotide
ttttgtggccaaccac

SEQ ID NO: 1275 - DNA, 16 bp, Artificial sequence
  Synthetic oligonucleotide
tcattatcatgcatac

SEQ ID NO: 1276 - DNA, 16 bp, Artificial sequence
  Synthetic oligonucleotide
ctagtgccaaaccaat

SEQ ID NO: 1277 - DNA, 16 bp, Artificial sequence
  Synthetic oligonucleotide
gaagtttttaagaggc

SEQ ID NO: 1278 - DNA, 16 bp, Artificial sequence
  Synthetic oligonucleotide
cctgtgtaaataagtt

SEQ ID NO: 1279 - DNA, 16 bp, Artificial sequence
  Synthetic oligonucleotide
ttggaatgctacttga

SEQ ID NO: 1280 - DNA, 16 bp, Artificial sequence
  Synthetic oligonucleotide
gttgatattctgtggc

SEQ ID NO: 1281 - DNA, 16 bp, Artificial sequence
  Synthetic oligonucleotide
gctgcctgctgaaact

SEQ ID NO: 1282 - DNA, 16 bp, Artificial sequence
  Synthetic oligonucleotide
cgttttgggctaatga

SEQ ID NO: 1283 - DNA, 16 bp, Artificial sequence
  Synthetic oligonucleotide
gagttatacagaagac

SEQ ID NO: 1284 - DNA, 16 bp, Artificial sequence
  Synthetic oligonucleotide
ggaaatatagagggtc

SEQ ID NO: 1285 - DNA, 16 bp, Artificial sequence
  Synthetic oligonucleotide
aaaaggttatcatggg

SEQ ID NO: 1286 - DNA, 16 bp, Artificial sequence
  Synthetic oligonucleotide
ctgtgttagctttaat

SEQ ID NO: 1287 - DNA, 16 bp, Artificial sequence
  Synthetic oligonucleotide
cttgggtccattgttt

SEQ ID NO: 1288 - DNA, 16 bp, Artificial sequence
  Synthetic oligonucleotide
tagtcttgatgtagtg

SEQ ID NO: 1289 - DNA, 16 bp, Artificial sequence
  Synthetic oligonucleotide
ttataactacaagagg

SEQ ID NO: 1290 - DNA, 16 bp, Artificial sequence
  Synthetic oligonucleotide
atctaactaacctgac

SEQ ID NO: 1291 - DNA, 16 bp, Artificial sequence
  Synthetic oligonucleotide
gtaattttcagatccc

SEQ ID NO: 1292 - DNA, 16 bp, Artificial sequence
  Synthetic oligonucleotide
tatatacatcaactcc

SEQ ID NO: 1293 - DNA, 16 bp, Artificial sequence
  Synthetic oligonucleotide
gcttaaatgtttaacc

SEQ ID NO: 1294 - DNA, 16 bp, Artificial sequence
  Synthetic oligonucleotide
gtttagattgcataag

SEQ ID NO: 1295 - DNA, 16 bp, Artificial sequence
  Synthetic oligonucleotide
atttagttggtagctt

SEQ ID NO: 1296 - DNA, 16 bp, Artificial sequence
  Synthetic oligonucleotide
aaaccttgaatgagtg

SEQ ID NO: 1297 - DNA, 16 bp, Artificial sequence
  Synthetic oligonucleotide
ccataggacatggaga

SEQ ID NO: 1298 - DNA, 16 bp, Artificial sequence
  Synthetic oligonucleotide
aattctaaactagtgg

SEQ ID NO: 1299 - DNA, 16 bp, Artificial sequence
  Synthetic oligonucleotide
taaaaattggcctcct

SEQ ID NO: 1300 - DNA, 16 bp, Artificial sequence
  Synthetic oligonucleotide
atatatccttccttgg

SEQ ID NO: 1301 - DNA, 16 bp, Artificial sequence
  Synthetic oligonucleotide
gtaaagtttgttagag

SEQ ID NO: 1302 - DNA, 16 bp, Artificial sequence
  Synthetic oligonucleotide
gtcataaaggtgggat

SEQ ID NO: 1303 - DNA, 16 bp, Artificial sequence
  Synthetic oligonucleotide
cgttataagtttcatg

SEQ ID NO: 1304 - DNA, 16 bp, Artificial sequence
  Synthetic oligonucleotide
aatcatggtgtggagg

SEQ ID NO: 1305 - DNA, 16 bp, Artificial sequence
  Synthetic oligonucleotide
ggaagattaatcataa

SEQ ID NO: 1306 - DNA, 16 bp, Artificial sequence
  Synthetic oligonucleotide
ctaatgtatgaggtct

SEQ ID NO: 1307 - DNA, 16 bp, Artificial sequence
  Synthetic oligonucleotide
taatgaatcatgattg

SEQ ID NO: 1308 - DNA, 16 bp, Artificial sequence
  Synthetic oligonucleotide
gaatcaaatagatcct

SEQ ID NO: 1309 - DNA, 16 bp, Artificial sequence
  Synthetic oligonucleotide
accaatatgggatgag

SEQ ID NO: 1310 - DNA, 16 bp, Artificial sequence
  Synthetic oligonucleotide
ataattacaacctggt

SEQ ID NO: 1311 - DNA, 16 bp, Artificial sequence
  Synthetic oligonucleotide
ctcttgacaatggttg

SEQ ID NO: 1312 - DNA, 16 bp, Artificial sequence
  Synthetic oligonucleotide
catgattaagcagaat

SEQ ID NO: 1313 - DNA, 16 bp, Artificial sequence
  Synthetic oligonucleotide
atcaatttatcatacc

SEQ ID NO: 1314 - DNA, 16 bp, Artificial sequence
  Synthetic oligonucleotide
agacaagagttcttgc

SEQ ID NO: 1315 - DNA, 16 bp, Artificial sequence
  Synthetic oligonucleotide
aaattggtttcgaatc

SEQ ID NO: 1316 - DNA, 16 bp, Artificial sequence
  Synthetic oligonucleotide
ctttagtcaacagtac

SEQ ID NO: 1317 - DNA, 16 bp, Artificial sequence
  Synthetic oligonucleotide
aacaatcaggagttgc

SEQ ID NO: 1318 - DNA, 16 bp, Artificial sequence
  Synthetic oligonucleotide
ctctataaaatcaatc

SEQ ID NO: 1319 - DNA, 16 bp, Artificial sequence
  Synthetic oligonucleotide
tctaaattactccgtt

SEQ ID NO: 1320 - DNA, 16 bp, Artificial sequence
  Synthetic oligonucleotide
gtagaattgtctgtta

SEQ ID NO: 1321 - DNA, 16 bp, Artificial sequence
  Synthetic oligonucleotide
tccggtaagaatttcg

SEQ ID NO: 1322 - DNA, 16 bp, Artificial sequence
  Synthetic oligonucleotide
tagctaagtatacttt

SEQ ID NO: 1323 - DNA, 16 bp, Artificial sequence
  Synthetic oligonucleotide
attagatggtaaggag

SEQ ID NO: 1324 - DNA, 16 bp, Artificial sequence
  Synthetic oligonucleotide
gtaaatgatggcagga

SEQ ID NO: 1325 - DNA, 16 bp, Artificial sequence
  Synthetic oligonucleotide
agcaaagtttgggcag

SEQ ID NO: 1326 - DNA, 16 bp, Artificial sequence
  Synthetic oligonucleotide
aaattagaggcccagg

SEQ ID NO: 1327 - DNA, 16 bp, Artificial sequence
  Synthetic oligonucleotide
gaagttagtatagtta

SEQ ID NO: 1328 - DNA, 16 bp, Artificial sequence
  Synthetic oligonucleotide
ctagttacaaaccacc

SEQ ID NO: 1329 - DNA, 16 bp, Artificial sequence
  Synthetic oligonucleotide
agatttacttccttgt

SEQ ID NO: 1330 - DNA, 16 bp, Artificial sequence
  Synthetic oligonucleotide
taaggtaaactaaagt

SEQ ID NO: 1331 - DNA, 16 bp, Artificial sequence
  Synthetic oligonucleotide
atacataccactcttc

SEQ ID NO: 1332 - DNA, 16 bp, Artificial sequence
  Synthetic oligonucleotide
agtaactttattaacg

SEQ ID NO: 1333 - DNA, 16 bp, Artificial sequence
  Synthetic oligonucleotide
aatcacaagtaaggta

SEQ ID NO: 1334 - DNA, 16 bp, Artificial sequence
  Synthetic oligonucleotide
gaatacgctgagagtt

SEQ ID NO: 1335 - DNA, 16 bp, Artificial sequence
  Synthetic oligonucleotide
cagtccttgtgtagtc

SEQ ID NO: 1336 - DNA, 16 bp, Artificial sequence
  Synthetic oligonucleotide
ggagtagatgatggtg

SEQ ID NO: 1337 - DNA, 16 bp, Artificial sequence
  Synthetic oligonucleotide
gccacagattttctcc

SEQ ID NO: 1338 - DNA, 16 bp, Artificial sequence
  Synthetic oligonucleotide
aaccaatatgctctgt

SEQ ID NO: 1339 - DNA, 16 bp, Artificial sequence
  Synthetic oligonucleotide
gcactcagctgcagtt

SEQ ID NO: 1340 - DNA, 16 bp, Artificial sequence
  Synthetic oligonucleotide
ctaccacatacgcatg

SEQ ID NO: 1341 - DNA, 16 bp, Artificial sequence
  Synthetic oligonucleotide
tacatcacccacttct

SEQ ID NO: 1342 - DNA, 16 bp, Artificial sequence
  Synthetic oligonucleotide
atactgtcccagcatt

SEQ ID NO: 1343 - DNA, 16 bp, Artificial sequence
  Synthetic oligonucleotide
tcatccttggtgctga

SEQ ID NO: 1344 - DNA, 16 bp, Artificial sequence
  Synthetic oligonucleotide
tgtcctaggatgttga

SEQ ID NO: 1345 - DNA, 16 bp, Artificial sequence
  Synthetic oligonucleotide
gtggccatgatttctc

SEQ ID NO: 1346 - DNA, 16 bp, Artificial sequence
  Synthetic oligonucleotide
gatgaggtaaggaatc

SEQ ID NO: 1347 - DNA, 16 bp, Artificial sequence
  Synthetic oligonucleotide
tctgatgtcagacctc

SEQ ID NO: 1348 - DNA, 16 bp, Artificial sequence
  Synthetic oligonucleotide
tggtgaacccagtatt

SEQ ID NO: 1349 - DNA, 16 bp, Artificial sequence
  Synthetic oligonucleotide
cttacgacttcatctg

SEQ ID NO: 1350 - DNA, 16 bp, Artificial sequence
  Synthetic oligonucleotide
cttattggtaagtatt

SEQ ID NO: 1351 - DNA, 16 bp, Artificial sequence
  Synthetic oligonucleotide
cgatttaaaatcgctg

SEQ ID NO: 1352 - DNA, 16 bp, Artificial sequence
  Synthetic oligonucleotide
attttgtggccaacca

SEQ ID NO: 1353 - DNA, 16 bp, Artificial sequence
  Synthetic oligonucleotide
catatcattatcatgc

SEQ ID NO: 1354 - DNA, 16 bp, Artificial sequence
  Synthetic oligonucleotide
gctagtgccaaaccaa

SEQ ID NO: 1355 - DNA, 16 bp, Artificial sequence
  Synthetic oligonucleotide
gtaagcacagaagttt

SEQ ID NO: 1356 - DNA, 16 bp, Artificial sequence
  Synthetic oligonucleotide
ccctgtgtaaataagt

SEQ ID NO: 1357 - DNA, 16 bp, Artificial sequence
  Synthetic oligonucleotide
attggaatgctacttg

SEQ ID NO: 1358 - DNA, 16 bp, Artificial sequence
  Synthetic oligonucleotide
tgttgatattctgtgg

SEQ ID NO: 1359 - DNA, 16 bp, Artificial sequence
  Synthetic oligonucleotide
taaagctgcctgctga

SEQ ID NO: 1360 - DNA, 16 bp, Artificial sequence
  Synthetic oligonucleotide
ccgttttgggctaatg

SEQ ID NO: 1361 - DNA, 16 bp, Artificial sequence
  Synthetic oligonucleotide
cttcagagttatacag

SEQ ID NO: 1362 - DNA, 16 bp, Artificial sequence
  Synthetic oligonucleotide
aggaaatatagagggt

SEQ ID NO: 1363 - DNA, 16 bp, Artificial sequence
  Synthetic oligonucleotide
gaaaaaggttatcatg

SEQ ID NO: 1364 - DNA, 16 bp, Artificial sequence
  Synthetic oligonucleotide
cctgtgttagctttaa

SEQ ID NO: 1365 - DNA, 16 bp, Artificial sequence
  Synthetic oligonucleotide
tcttgggtccattgtt

SEQ ID NO: 1366 - DNA, 16 bp, Artificial sequence
  Synthetic oligonucleotide
ttagtcttgatgtagt

SEQ ID NO: 1367 - DNA, 16 bp, Artificial sequence
  Synthetic oligonucleotide
gtttagaagtcaaacg

SEQ ID NO: 1368 - DNA, 16 bp, Artificial sequence
  Synthetic oligonucleotide
catctaactaacctga

SEQ ID NO: 1369 - DNA, 16 bp, Artificial sequence
  Synthetic oligonucleotide
taaaggtttctgttgc

SEQ ID NO: 1370 - DNA, 16 bp, Artificial sequence
  Synthetic oligonucleotide
attcgaatttcttcaa

SEQ ID NO: 1371 - DNA, 16 bp, Artificial sequence
  Synthetic oligonucleotide
gaatcattcagtagct

SEQ ID NO: 1372 - DNA, 16 bp, Artificial sequence
  Synthetic oligonucleotide
cagtttagattgcata

SEQ ID NO: 1373 - DNA, 16 bp, Artificial sequence
  Synthetic oligonucleotide
gatttagttggtagct

SEQ ID NO: 1374 - DNA, 16 bp, Artificial sequence
  Synthetic oligonucleotide
caaaccttgaatgagt

SEQ ID NO: 1375 - DNA, 16 bp, Artificial sequence
  Synthetic oligonucleotide
accataggacatggag

SEQ ID NO: 1376 - DNA, 16 bp, Artificial sequence
  Synthetic oligonucleotide
taattctaaactagtg

SEQ ID NO: 1377 - DNA, 16 bp, Artificial sequence
  Synthetic oligonucleotide
ataaaaattggcctcc

SEQ ID NO: 1378 - DNA, 16 bp, Artificial sequence
  Synthetic oligonucleotide
tggattacatacaaga

SEQ ID NO: 1379 - DNA, 16 bp, Artificial sequence
  Synthetic oligonucleotide
tgtaaagtttgttaga

SEQ ID NO: 1380 - DNA, 16 bp, Artificial sequence
  Synthetic oligonucleotide
tgtcataaaggtggga

SEQ ID NO: 1381 - DNA, 16 bp, Artificial sequence
  Synthetic oligonucleotide
ccgttataagtttcat

SEQ ID NO: 1382 - DNA, 16 bp, Artificial sequence
  Synthetic oligonucleotide
aaatcatggtgtggag

SEQ ID NO: 1383 - DNA, 16 bp, Artificial sequence
  Synthetic oligonucleotide
ctggaagattaatcat

SEQ ID NO: 1384 - DNA, 16 bp, Artificial sequence
  Synthetic oligonucleotide
agctaatgtatgaggt

SEQ ID NO: 1385 - DNA, 16 bp, Artificial sequence
  Synthetic oligonucleotide
ctaatgaatcatgatt

SEQ ID NO: 1386 - DNA, 16 bp, Artificial sequence
  Synthetic oligonucleotide
ctaatctcagtactcc

SEQ ID NO: 1387 - DNA, 16 bp, Artificial sequence
  Synthetic oligonucleotide
taccaatatgggatga

SEQ ID NO: 1388 - DNA, 16 bp, Artificial sequence
  Synthetic oligonucleotide
tataattacaacctgg

SEQ ID NO: 1389 - DNA, 16 bp, Artificial sequence
  Synthetic oligonucleotide
tctcttgacaatggtt

SEQ ID NO: 1390 - DNA, 16 bp, Artificial sequence
  Synthetic oligonucleotide
cttacatgattaagca

SEQ ID NO: 1391 - DNA, 16 bp, Artificial sequence
  Synthetic oligonucleotide
gcctaaacatttctca

SEQ ID NO: 1392 - DNA, 16 bp, Artificial sequence
  Synthetic oligonucleotide
gagacaagagttcttg

SEQ ID NO: 1393 - DNA, 16 bp, Artificial sequence
  Synthetic oligonucleotide
aaaaattggtttcgaa

SEQ ID NO: 1394 - DNA, 16 bp, Artificial sequence
  Synthetic oligonucleotide
ctctctaaagggctgc

SEQ ID NO: 1395 - DNA, 16 bp, Artificial sequence
  Synthetic oligonucleotide
ttttattgggcccaat

SEQ ID NO: 1396 - DNA, 16 bp, Artificial sequence
  Synthetic oligonucleotide
atctagcaacctctat

SEQ ID NO: 1397 - DNA, 16 bp, Artificial sequence
  Synthetic oligonucleotide
ttctaaattactccgt

SEQ ID NO: 1398 - DNA, 16 bp, Artificial sequence
  Synthetic oligonucleotide
gtgtagaattgtctgt

SEQ ID NO: 1399 - DNA, 16 bp, Artificial sequence
  Synthetic oligonucleotide
ttccggtaagaatttc

SEQ ID NO: 1400 - DNA, 16 bp, Artificial sequence
  Synthetic oligonucleotide
tatagctaagtatact

SEQ ID NO: 1401 - DNA, 16 bp, Artificial sequence
  Synthetic oligonucleotide
cattagatggtaagga

SEQ ID NO: 1402 - DNA, 16 bp, Artificial sequence
  Synthetic oligonucleotide
agtaaatgatggcagg

SEQ ID NO: 1403 - DNA, 16 bp, Artificial sequence
  Synthetic oligonucleotide
tagaatagtcttcagc

SEQ ID NO: 1404 - DNA, 16 bp, Artificial sequence
  Synthetic oligonucleotide
aatagccatgtagcta

SEQ ID NO: 1405 - DNA, 16 bp, Artificial sequence
  Synthetic oligonucleotide
tgaagttagtatagtt

SEQ ID NO: 1406 - DNA, 16 bp, Artificial sequence
  Synthetic oligonucleotide
cctagttacaaaccac

SEQ ID NO: 1407 - DNA, 16 bp, Artificial sequence
  Synthetic oligonucleotide
tgcaagatttacttcc

SEQ ID NO: 1408 - DNA, 16 bp, Artificial sequence
  Synthetic oligonucleotide
ctctataataaggtaa

SEQ ID NO: 1409 - DNA, 16 bp, Artificial sequence
  Synthetic oligonucleotide
gatacataccactctt

SEQ ID NO: 1410 - DNA, 16 bp, Artificial sequence
  Synthetic oligonucleotide
caagacattctagcct

SEQ ID NO: 1411 - DNA, 16 bp, Artificial sequence
  Synthetic oligonucleotide
gtaatcacaagtaagg

SEQ ID NO: 1412 - DNA, 16 bp, Artificial sequence
  Synthetic oligonucleotide
agaatacgctgagagt

SEQ ID NO: 1413 - DNA, 16 bp, Artificial sequence
  Synthetic oligonucleotide
tcagtccttgtgtagt

SEQ ID NO: 1414 - DNA, 16 bp, Artificial sequence
  Synthetic oligonucleotide
taggagtagatgatgg

SEQ ID NO: 1415 - DNA, 16 bp, Artificial sequence
  Synthetic oligonucleotide
acaatctccccagcca

SEQ ID NO: 1416 - DNA, 16 bp, Artificial sequence
  Synthetic oligonucleotide
gaaccaatatgctctg

SEQ ID NO: 1417 - DNA, 16 bp, Artificial sequence
  Synthetic oligonucleotide
ggcactcagctgcagt

SEQ ID NO: 1418 - DNA, 16 bp, Artificial sequence
  Synthetic oligonucleotide
tctaccacatacgcat

SEQ ID NO: 1419 - DNA, 16 bp, Artificial sequence
  Synthetic oligonucleotide
ttacatcacccacttc

SEQ ID NO: 1420 - DNA, 16 bp, Artificial sequence
  Synthetic oligonucleotide
tatactgtcccagcat

SEQ ID NO: 1421 - DNA, 16 bp, Artificial sequence
  Synthetic oligonucleotide
cttcatccttggtgct

SEQ ID NO: 1422 - DNA, 16 bp, Artificial sequence
  Synthetic oligonucleotide
atgtcctaggatgttg

SEQ ID NO: 1423 - DNA, 16 bp, Artificial sequence
  Synthetic oligonucleotide
gatgtggccatgattt

SEQ ID NO: 1424 - DNA, 16 bp, Artificial sequence
  Synthetic oligonucleotide
aatatgggatgaggta

SEQ ID NO: 1425 - DNA, 16 bp, Artificial sequence
  Synthetic oligonucleotide
ttctgatgtcagacct

SEQ ID NO: 1426 - DNA, 16 bp, Artificial sequence
  Synthetic oligonucleotide
ttggtgaacccagtat

SEQ ID NO: 1427 - DNA, 16 bp, Artificial sequence
  Synthetic oligonucleotide
tcttacgacttcatct

SEQ ID NO: 1428 - DNA, 16 bp, Artificial sequence
  Synthetic oligonucleotide
tcttattggtaagtat

SEQ ID NO: 1429 - DNA, 16 bp, Artificial sequence
  Synthetic oligonucleotide
acgatttaaaatcgct

SEQ ID NO: 1430 - DNA, 16 bp, Artificial sequence
  Synthetic oligonucleotide
gattttgtggccaacc

SEQ ID NO: 1431 - DNA, 16 bp, Artificial sequence
  Synthetic oligonucleotide
cgaaactattcatatc

SEQ ID NO: 1432 - DNA, 16 bp, Artificial sequence
  Synthetic oligonucleotide
tgctagtgccaaacca

SEQ ID NO: 1433 - DNA, 16 bp, Artificial sequence
  Synthetic oligonucleotide
gtttatgtaagcacag

SEQ ID NO: 1434 - DNA, 16 bp, Artificial sequence
  Synthetic oligonucleotide
tccctgtgtaaataag

SEQ ID NO: 1435 - DNA, 16 bp, Artificial sequence
  Synthetic oligonucleotide
gattggaatgctactt

SEQ ID NO: 1436 - DNA, 16 bp, Artificial sequence
  Synthetic oligonucleotide
gttcttgttgatattc

SEQ ID NO: 1437 - DNA, 16 bp, Artificial sequence
  Synthetic oligonucleotide
gataaagctgcctgct

SEQ ID NO: 1438 - DNA, 16 bp, Artificial sequence
  Synthetic oligonucleotide
accgttttgggctaat

SEQ ID NO: 1439 - DNA, 16 bp, Artificial sequence
  Synthetic oligonucleotide
gacttcagagttatac

SEQ ID NO: 1440 - DNA, 16 bp, Artificial sequence
  Synthetic oligonucleotide
gactataaaaagggag

SEQ ID NO: 1441 - DNA, 16 bp, Artificial sequence
  Synthetic oligonucleotide
gaccaaggatatatga

SEQ ID NO: 1442 - DNA, 16 bp, Artificial sequence
  Synthetic oligonucleotide
tcctgtgttagcttta

SEQ ID NO: 1443 - DNA, 16 bp, Artificial sequence
  Synthetic oligonucleotide
ctcttgggtccattgt

SEQ ID NO: 1444 - DNA, 16 bp, Artificial sequence
  Synthetic oligonucleotide
attagtcttgatgtag

SEQ ID NO: 1445 - DNA, 16 bp, Artificial sequence
  Synthetic oligonucleotide
agtttagaagtcaaac

SEQ ID NO: 1446 - DNA, 16 bp, Artificial sequence
  Synthetic oligonucleotide
tcttaattacattccc

SEQ ID NO: 1447 - DNA, 16 bp, Artificial sequence
  Synthetic oligonucleotide
ctaaaggtttctgttg

SEQ ID NO: 1448 - DNA, 16 bp, Artificial sequence
  Synthetic oligonucleotide
cattcgaatttcttca

SEQ ID NO: 1449 - DNA, 16 bp, Artificial sequence
  Synthetic oligonucleotide
agtgaatcattcagta

SEQ ID NO: 1450 - DNA, 16 bp, Artificial sequence
  Synthetic oligonucleotide
acagtttagattgcat

SEQ ID NO: 1451 - DNA, 16 bp, Artificial sequence
  Synthetic oligonucleotide
tgatttagttggtagc

SEQ ID NO: 1452 - DNA, 16 bp, Artificial sequence
  Synthetic oligonucleotide
ggcaaaccttgaatga

SEQ ID NO: 1453 - DNA, 16 bp, Artificial sequence
  Synthetic oligonucleotide
aaccataggacatgga

SEQ ID NO: 1454 - DNA, 16 bp, Artificial sequence
  Synthetic oligonucleotide
gtaattctaaactagt

SEQ ID NO: 1455 - DNA, 16 bp, Artificial sequence
  Synthetic oligonucleotide
ctcgggaagtttagac

SEQ ID NO: 1456 - DNA, 16 bp, Artificial sequence
  Synthetic oligonucleotide
gtggattacatacaag

SEQ ID NO: 1457 - DNA, 16 bp, Artificial sequence
  Synthetic oligonucleotide
atgtaaagtttgttag

SEQ ID NO: 1458 - DNA, 16 bp, Artificial sequence
  Synthetic oligonucleotide
caagggaacactgtca

SEQ ID NO: 1459 - DNA, 16 bp, Artificial sequence
  Synthetic oligonucleotide
tccgttataagtttca

SEQ ID NO: 1460 - DNA, 16 bp, Artificial sequence
  Synthetic oligonucleotide
acaaaatcatggtgtg

SEQ ID NO: 1461 - DNA, 16 bp, Artificial sequence
  Synthetic oligonucleotide
atattgaggcactgga

SEQ ID NO: 1462 - DNA, 16 bp, Artificial sequence
  Synthetic oligonucleotide
tagctaatgtatgagg

SEQ ID NO: 1463 - DNA, 16 bp, Artificial sequence
  Synthetic oligonucleotide
actaatgaatcatgat

SEQ ID NO: 1464 - DNA, 16 bp, Artificial sequence
  Synthetic oligonucleotide
actaatctcagtactc

SEQ ID NO: 1465 - DNA, 16 bp, Artificial sequence
  Synthetic oligonucleotide
cttaccaatatgggat

SEQ ID NO: 1466 - DNA, 16 bp, Artificial sequence
  Synthetic oligonucleotide
tggaaacatgcttggc

SEQ ID NO: 1467 - DNA, 16 bp, Artificial sequence
  Synthetic oligonucleotide
ttctcttgacaatggt

SEQ ID NO: 1468 - DNA, 16 bp, Artificial sequence
  Synthetic oligonucleotide
gtataaatggcaattc

SEQ ID NO: 1469 - DNA, 16 bp, Artificial sequence
  Synthetic oligonucleotide
tattagttggcctgcc

SEQ ID NO: 1470 - DNA, 16 bp, Artificial sequence
  Synthetic oligonucleotide
tcttatccacaccttc

SEQ ID NO: 1471 - DNA, 16 bp, Artificial sequence
  Synthetic oligonucleotide
aaaaaattggtttcga

SEQ ID NO: 1472 - DNA, 16 bp, Artificial sequence
  Synthetic oligonucleotide
ctatcagaacagttca

SEQ ID NO: 1473 - DNA, 16 bp, Artificial sequence
  Synthetic oligonucleotide
tttttattgggcccaa

SEQ ID NO: 1474 - DNA, 16 bp, Artificial sequence
  Synthetic oligonucleotide
aatctagcaacctcta

SEQ ID NO: 1475 - DNA, 16 bp, Artificial sequence
  Synthetic oligonucleotide
tttctaaattactccg

SEQ ID NO: 1476 - DNA, 16 bp, Artificial sequence
  Synthetic oligonucleotide
tagtgtagaattgtct

SEQ ID NO: 1477 - DNA, 16 bp, Artificial sequence
  Synthetic oligonucleotide
agaaatctaagaaccc

SEQ ID NO: 1478 - DNA, 16 bp, Artificial sequence
  Synthetic oligonucleotide
attctatagctaagta

SEQ ID NO: 1479 - DNA, 16 bp, Artificial sequence
  Synthetic oligonucleotide
gcattagatggtaagg

SEQ ID NO: 1480 - DNA, 16 bp, Artificial sequence
  Synthetic oligonucleotide
ccataatctgtgatta

SEQ ID NO: 1481 - DNA, 16 bp, Artificial sequence
  Synthetic oligonucleotide
gttagaatagtcttca

SEQ ID NO: 1482 - DNA, 16 bp, Artificial sequence
  Synthetic oligonucleotide
gaatagccatgtagct

SEQ ID NO: 1483 - DNA, 16 bp, Artificial sequence
  Synthetic oligonucleotide
atgaagttagtatagt

SEQ ID NO: 1484 - DNA, 16 bp, Artificial sequence
  Synthetic oligonucleotide
gcctagttacaaacca

SEQ ID NO: 1485 - DNA, 16 bp, Artificial sequence
  Synthetic oligonucleotide
gactaatgcaagattt

SEQ ID NO: 1486 - DNA, 16 bp, Artificial sequence
  Synthetic oligonucleotide
actctataataaggta

SEQ ID NO: 1487 - DNA, 16 bp, Artificial sequence
  Synthetic oligonucleotide
actgatacataccact

SEQ ID NO: 1488 - DNA, 16 bp, Artificial sequence
  Synthetic oligonucleotide
atcaagacattctagc

SEQ ID NO: 1489 - DNA, 16 bp, Artificial sequence
  Synthetic oligonucleotide
tagtaatcacaagtaa

SEQ ID NO: 1490 - DNA, 16 bp, Artificial sequence
  Synthetic oligonucleotide
tagaatacgctgagag

SEQ ID NO: 1491 - DNA, 16 bp, Artificial sequence
  Synthetic oligonucleotide
ttcagtccttgtgtag

SEQ ID NO: 1492 - DNA, 16 bp, Artificial sequence
  Synthetic oligonucleotide
gtaggagtagatgatg

SEQ ID NO: 1493 - DNA, 16 bp, Artificial sequence
  Synthetic oligonucleotide
aacaatctccccagcc

SEQ ID NO: 1494 - DNA, 16 bp, Artificial sequence
  Synthetic oligonucleotide
agaaccaatatgctct

SEQ ID NO: 1495 - DNA, 16 bp, Artificial sequence
  Synthetic oligonucleotide
cggcactcagctgcag

SEQ ID NO: 1496 - DNA, 16 bp, Artificial sequence
  Synthetic oligonucleotide
gtctaccacatacgca

SEQ ID NO: 1497 - DNA, 16 bp, Artificial sequence
  Synthetic oligonucleotide
gttacatcacccactt

SEQ ID NO: 1498 - DNA, 16 bp, Artificial sequence
  Synthetic oligonucleotide
atatactgtcccagca

SEQ ID NO: 1499 - DNA, 16 bp, Artificial sequence
  Synthetic oligonucleotide
tcttcatccttggtgc

SEQ ID NO: 1500 - DNA, 16 bp, Artificial sequence
  Synthetic oligonucleotide
aatgtcctaggatgtt

SEQ ID NO: 1501 - DNA, 16 bp, Artificial sequence
  Synthetic oligonucleotide
cgatgtggccatgatt

SEQ ID NO: 1502 - DNA, 16 bp, Artificial sequence
  Synthetic oligonucleotide
caatatgggatgaggt

SEQ ID NO: 1503 - DNA, 16 bp, Artificial sequence
  Synthetic oligonucleotide
gttctgatgtcagacc

SEQ ID NO: 1504 - DNA, 16 bp, Artificial sequence
  Synthetic oligonucleotide
tttggtgaacccagta

SEQ ID NO: 1505 - DNA, 16 bp, Artificial sequence
  Synthetic oligonucleotide
ttcttacgacttcatc

SEQ ID NO: 1506 - DNA, 16 bp, Artificial sequence
  Synthetic oligonucleotide
tacgatggaacaaaaa

SEQ ID NO: 1507 - DNA, 16 bp, Artificial sequence
  Synthetic oligonucleotide
tacgatttaaaatcgc

SEQ ID NO: 1508 - DNA, 16 bp, Artificial sequence
  Synthetic oligonucleotide
tgattttgtggccaac

SEQ ID NO: 1509 - DNA, 16 bp, Artificial sequence
  Synthetic oligonucleotide
tcgaaactattcatat

SEQ ID NO: 1510 - DNA, 16 bp, Artificial sequence
  Synthetic oligonucleotide
ctgctagtgccaaacc

SEQ ID NO: 1511 - DNA, 16 bp, Artificial sequence
  Synthetic oligonucleotide
gtatgtttatgtaagc

SEQ ID NO: 1512 - DNA, 16 bp, Artificial sequence
  Synthetic oligonucleotide
accttccctgtgtaaa

SEQ ID NO: 1513 - DNA, 16 bp, Artificial sequence
  Synthetic oligonucleotide
agattggaatgctact

SEQ ID NO: 1514 - DNA, 16 bp, Artificial sequence
  Synthetic oligonucleotide
gtgttcttgttgatat

SEQ ID NO: 1515 - DNA, 16 bp, Artificial sequence
  Synthetic oligonucleotide
agataaagctgcctgc

SEQ ID NO: 1516 - DNA, 16 bp, Artificial sequence
  Synthetic oligonucleotide
caccgttttgggctaa

SEQ ID NO: 1517 - DNA, 16 bp, Artificial sequence
  Synthetic oligonucleotide
ggacttcagagttata

SEQ ID NO: 1518 - DNA, 16 bp, Artificial sequence
  Synthetic oligonucleotide
tatcttataagactat

SEQ ID NO: 1519 - DNA, 16 bp, Artificial sequence
  Synthetic oligonucleotide
ggaccaaggatatatg

SEQ ID NO: 1520 - DNA, 16 bp, Artificial sequence
  Synthetic oligonucleotide
tctcttgggtccattg

SEQ ID NO: 1521 - DNA, 16 bp, Artificial sequence
  Synthetic oligonucleotide
gattagtcttgatgta

SEQ ID NO: 1522 - DNA, 16 bp, Artificial sequence
  Synthetic oligonucleotide
accttattaatatccc

SEQ ID NO: 1523 - DNA, 16 bp, Artificial sequence
  Synthetic oligonucleotide
gttcttaattacattc

SEQ ID NO: 1524 - DNA, 16 bp, Artificial sequence
  Synthetic oligonucleotide
cactaaaggtttctgt

SEQ ID NO: 1525 - DNA, 16 bp, Artificial sequence
  Synthetic oligonucleotide
tcattcgaatttcttc

SEQ ID NO: 1526 - DNA, 16 bp, Artificial sequence
  Synthetic oligonucleotide
gagtgaatcattcagt

SEQ ID NO: 1527 - DNA, 16 bp, Artificial sequence
  Synthetic oligonucleotide
aacagtttagattgca

SEQ ID NO: 1528 - DNA, 16 bp, Artificial sequence
  Synthetic oligonucleotide
ctgatttagttggtag

SEQ ID NO: 1529 - DNA, 16 bp, Artificial sequence
  Synthetic oligonucleotide
tttagggcaaaccttg

SEQ ID NO: 1530 - DNA, 16 bp, Artificial sequence
  Synthetic oligonucleotide
taaccataggacatgg

SEQ ID NO: 1531 - DNA, 16 bp, Artificial sequence
  Synthetic oligonucleotide
agtaattctaaactag

SEQ ID NO: 1532 - DNA, 16 bp, Artificial sequence
  Synthetic oligonucleotide
aaattggcctcctggg

SEQ ID NO: 1533 - DNA, 16 bp, Artificial sequence
  Synthetic oligonucleotide
ataatgggcagagctg

SEQ ID NO: 1534 - DNA, 16 bp, Artificial sequence
  Synthetic oligonucleotide
ttattgtagggattga

SEQ ID NO: 1535 - DNA, 16 bp, Artificial sequence
  Synthetic oligonucleotide
gccaagggaacactgt

SEQ ID NO: 1536 - DNA, 16 bp, Artificial sequence
  Synthetic oligonucleotide
gaagtatgtgaactcc

SEQ ID NO: 1537 - DNA, 16 bp, Artificial sequence
  Synthetic oligonucleotide
attacttctgatgtcc

SEQ ID NO: 1538 - DNA, 16 bp, Artificial sequence
  Synthetic oligonucleotide
aatattgaggcactgg

SEQ ID NO: 1539 - DNA, 16 bp, Artificial sequence
  Synthetic oligonucleotide
aggtagctaatgtatg

SEQ ID NO: 1540 - DNA, 16 bp, Artificial sequence
  Synthetic oligonucleotide
cactaatgaatcatga

SEQ ID NO: 1541 - DNA, 16 bp, Artificial sequence
  Synthetic oligonucleotide
cactaatctcagtact

SEQ ID NO: 1542 - DNA, 16 bp, Artificial sequence
  Synthetic oligonucleotide
atacttaccaatatgg

SEQ ID NO: 1543 - DNA, 16 bp, Artificial sequence
  Synthetic oligonucleotide
atggaaacatgcttgg

SEQ ID NO: 1544 - DNA, 16 bp, Artificial sequence
  Synthetic oligonucleotide
caatggttgatagttt

SEQ ID NO: 1545 - DNA, 16 bp, Artificial sequence
  Synthetic oligonucleotide
gagtataaatggcaat

SEQ ID NO: 1546 - DNA, 16 bp, Artificial sequence
  Synthetic oligonucleotide
ctattagttggcctgc

SEQ ID NO: 1547 - DNA, 16 bp, Artificial sequence
  Synthetic oligonucleotide
gttcttatccacacct

SEQ ID NO: 1548 - DNA, 16 bp, Artificial sequence
  Synthetic oligonucleotide
taaaaaattggtttcg

SEQ ID NO: 1549 - DNA, 16 bp, Artificial sequence
  Synthetic oligonucleotide
actatcagaacagttc

SEQ ID NO: 1550 - DNA, 16 bp, Artificial sequence
  Synthetic oligonucleotide
gtttttattgggccca

SEQ ID NO: 1551 - DNA, 16 bp, Artificial sequence
  Synthetic oligonucleotide
caatctagcaacctct

SEQ ID NO: 1552 - DNA, 16 bp, Artificial sequence
  Synthetic oligonucleotide
agcaagccaacagaga

SEQ ID NO: 1553 - DNA, 16 bp, Artificial sequence
  Synthetic oligonucleotide
cttagtgtagaattgt

SEQ ID NO: 1554 - DNA, 16 bp, Artificial sequence
  Synthetic oligonucleotide
aattatttcttgcgag

SEQ ID NO: 1555 - DNA, 16 bp, Artificial sequence
  Synthetic oligonucleotide
aattctatagctaagt

SEQ ID NO: 1556 - DNA, 16 bp, Artificial sequence
  Synthetic oligonucleotide
ggcattagatggtaag

SEQ ID NO: 1557 - DNA, 16 bp, Artificial sequence
  Synthetic oligonucleotide
gccataatctgtgatt

SEQ ID NO: 1558 - DNA, 16 bp, Artificial sequence
  Synthetic oligonucleotide
agttagaatagtcttc

SEQ ID NO: 1559 - DNA, 16 bp, Artificial sequence
  Synthetic oligonucleotide
attgaatagccatgta

SEQ ID NO: 1560 - DNA, 16 bp, Artificial sequence
  Synthetic oligonucleotide
tatgaagttagtatag

SEQ ID NO: 1561 - DNA, 16 bp, Artificial sequence
  Synthetic oligonucleotide
tatatacctgttgcct

SEQ ID NO: 1562 - DNA, 16 bp, Artificial sequence
  Synthetic oligonucleotide
atgagtaggcaactga

SEQ ID NO: 1563 - DNA, 16 bp, Artificial sequence
  Synthetic oligonucleotide
ctattatgcactctat

SEQ ID NO: 1564 - DNA, 16 bp, Artificial sequence
  Synthetic oligonucleotide
cactgatacataccac

SEQ ID NO: 1565 - DNA, 16 bp, Artificial sequence
  Synthetic oligonucleotide
gcatcaagacattcta

SEQ ID NO: 1566 - DNA, 16 bp, Artificial sequence
  Synthetic oligonucleotide
tatagtaatcacaagt

SEQ ID NO: 1567 - DNA, 16 bp, Artificial sequence
  Synthetic oligonucleotide
ttagaatacgctgaga

SEQ ID NO: 1568 - DNA, 16 bp, Artificial sequence
  Synthetic oligonucleotide
gttcagtccttgtgta

SEQ ID NO: 1569 - DNA, 16 bp, Artificial sequence
  Synthetic oligonucleotide
agtaggagtagatgat

SEQ ID NO: 1570 - DNA, 16 bp, Artificial sequence
  Synthetic oligonucleotide
gaacaatctccccagc

SEQ ID NO: 1571 - DNA, 16 bp, Artificial sequence
  Synthetic oligonucleotide
cagaaccaatatgctc

SEQ ID NO: 1572 - DNA, 16 bp, Artificial sequence
  Synthetic oligonucleotide
tcggcactcagctgca

SEQ ID NO: 1573 - DNA, 16 bp, Artificial sequence
  Synthetic oligonucleotide
agtctaccacatacgc

SEQ ID NO: 1574 - DNA, 16 bp, Artificial sequence
  Synthetic oligonucleotide
tgttacatcacccact

SEQ ID NO: 1575 - DNA, 16 bp, Artificial sequence
  Synthetic oligonucleotide
gatatactgtcccagc

SEQ ID NO: 1576 - DNA, 16 bp, Artificial sequence
  Synthetic oligonucleotide
ctcttcatccttggtg

SEQ ID NO: 1577 - DNA, 16 bp, Artificial sequence
  Synthetic oligonucleotide
aaatgtcctaggatgt

SEQ ID NO: 1578 - DNA, 16 bp, Artificial sequence
  Synthetic oligonucleotide
acgatgtggccatgat

SEQ ID NO: 1579 - DNA, 16 bp, Artificial sequence
  Synthetic oligonucleotide
acaatatgggatgagg

SEQ ID NO: 1580 - DNA, 16 bp, Artificial sequence
  Synthetic oligonucleotide
agttctgatgtcagac

SEQ ID NO: 1581 - DNA, 16 bp, Artificial sequence
  Synthetic oligonucleotide
taatcttgtgcttgga

SEQ ID NO: 1582 - DNA, 16 bp, Artificial sequence
  Synthetic oligonucleotide
cttcttacgacttcat

SEQ ID NO: 1583 - DNA, 16 bp, Artificial sequence
  Synthetic oligonucleotide
atacgatggaacaaaa

SEQ ID NO: 1584 - DNA, 16 bp, Artificial sequence
  Synthetic oligonucleotide
atacgatttaaaatcg

SEQ ID NO: 1585 - DNA, 16 bp, Artificial sequence
  Synthetic oligonucleotide
ggagcttatttattca

SEQ ID NO: 1586 - DNA, 16 bp, Artificial sequence
  Synthetic oligonucleotide
ttcgaaactattcata

SEQ ID NO: 1587 - DNA, 16 bp, Artificial sequence
  Synthetic oligonucleotide
gctgctagtgccaaac

SEQ ID NO: 1588 - DNA, 16 bp, Artificial sequence
  Synthetic oligonucleotide
gtccacctttaaatgg

SEQ ID NO: 1589 - DNA, 16 bp, Artificial sequence
  Synthetic oligonucleotide
aaccttccctgtgtaa

SEQ ID NO: 1590 - DNA, 16 bp, Artificial sequence
  Synthetic oligonucleotide
cagattggaatgctac

SEQ ID NO: 1591 - DNA, 16 bp, Artificial sequence
  Synthetic oligonucleotide
tgtgttcttgttgata

SEQ ID NO: 1592 - DNA, 16 bp, Artificial sequence
  Synthetic oligonucleotide
gagataaagctgcctg

SEQ ID NO: 1593 - DNA, 16 bp, Artificial sequence
  Synthetic oligonucleotide
gcaccgttttgggcta

SEQ ID NO: 1594 - DNA, 16 bp, Artificial sequence
  Synthetic oligonucleotide
ggtggacttcagagtt

SEQ ID NO: 1595 - DNA, 16 bp, Artificial sequence
  Synthetic oligonucleotide
gtatcttataagacta

SEQ ID NO: 1596 - DNA, 16 bp, Artificial sequence
  Synthetic oligonucleotide
gggaccaaggatatat

SEQ ID NO: 1597 - DNA, 16 bp, Artificial sequence
  Synthetic oligonucleotide
agtacagttccttttc

SEQ ID NO: 1598 - DNA, 16 bp, Artificial sequence
  Synthetic oligonucleotide
ttctcttgggtccatt

SEQ ID NO: 1599 - DNA, 16 bp, Artificial sequence
  Synthetic oligonucleotide
agattagtcttgatgt

SEQ ID NO: 1600 - DNA, 16 bp, Artificial sequence
  Synthetic oligonucleotide
caccttattaatatcc

SEQ ID NO: 1601 - DNA, 16 bp, Artificial sequence
  Synthetic oligonucleotide
gcttagttcttaatta

SEQ ID NO: 1602 - DNA, 16 bp, Artificial sequence
  Synthetic oligonucleotide
gcactaaaggtttctg

SEQ ID NO: 1603 - DNA, 16 bp, Artificial sequence
  Synthetic oligonucleotide
ttcattcgaatttctt

SEQ ID NO: 1604 - DNA, 16 bp, Artificial sequence
  Synthetic oligonucleotide
ccttagagtgaatcat

SEQ ID NO: 1605 - DNA, 16 bp, Artificial sequence
  Synthetic oligonucleotide
caacagtttagattgc

SEQ ID NO: 1606 - DNA, 16 bp, Artificial sequence
  Synthetic oligonucleotide
actgatttagttggta

SEQ ID NO: 1607 - DNA, 16 bp, Artificial sequence
  Synthetic oligonucleotide
atttagggcaaacctt

SEQ ID NO: 1608 - DNA, 16 bp, Artificial sequence
  Synthetic oligonucleotide
ataaccataggacatg

SEQ ID NO: 1609 - DNA, 16 bp, Artificial sequence
  Synthetic oligonucleotide
ctaagtagtaattcta

SEQ ID NO: 1610 - DNA, 16 bp, Artificial sequence
  Synthetic oligonucleotide
aaaaattggcctcctg

SEQ ID NO: 1611 - DNA, 16 bp, Artificial sequence
  Synthetic oligonucleotide
aataatgggcagagct

SEQ ID NO: 1612 - DNA, 16 bp, Artificial sequence
  Synthetic oligonucleotide
gttattgtagggattg

SEQ ID NO: 1613 - DNA, 16 bp, Artificial sequence
  Synthetic oligonucleotide
caagacagactgttga

SEQ ID NO: 1614 - DNA, 16 bp, Artificial sequence
  Synthetic oligonucleotide
agaagtatgtgaactc

SEQ ID NO: 1615 - DNA, 16 bp, Artificial sequence
  Synthetic oligonucleotide
gtaattacttctgatg

SEQ ID NO: 1616 - DNA, 16 bp, Artificial sequence
  Synthetic oligonucleotide
taatattgaggcactg

SEQ ID NO: 1617 - DNA, 16 bp, Artificial sequence
  Synthetic oligonucleotide
tataggtagctaatgt

SEQ ID NO: 1618 - DNA, 16 bp, Artificial sequence
  Synthetic oligonucleotide
acactaatgaatcatg

SEQ ID NO: 1619 - DNA, 16 bp, Artificial sequence
  Synthetic oligonucleotide
acactaatctcagtac

SEQ ID NO: 1620 - DNA, 16 bp, Artificial sequence
  Synthetic oligonucleotide
gatacttaccaatatg

SEQ ID NO: 1621 - DNA, 16 bp, Artificial sequence
  Synthetic oligonucleotide
ctgtaggttttgcttc

SEQ ID NO: 1622 - DNA, 16 bp, Artificial sequence
  Synthetic oligonucleotide
gacaatggttgatagt

SEQ ID NO: 1623 - DNA, 16 bp, Artificial sequence
  Synthetic oligonucleotide
gccaaaaatcagccac

SEQ ID NO: 1624 - DNA, 16 bp, Artificial sequence
  Synthetic oligonucleotide
tctattagttggcctg

SEQ ID NO: 1625 - DNA, 16 bp, Artificial sequence
  Synthetic oligonucleotide
aattttcgggttctta

SEQ ID NO: 1626 - DNA, 16 bp, Artificial sequence
  Synthetic oligonucleotide
tccagtaaaaaattgg

SEQ ID NO: 1627 - DNA, 16 bp, Artificial sequence
  Synthetic oligonucleotide
ccactatcagaacagt

SEQ ID NO: 1628 - DNA, 16 bp, Artificial sequence
  Synthetic oligonucleotide
acgaagcctgaatgcc

SEQ ID NO: 1629 - DNA, 16 bp, Artificial sequence
  Synthetic oligonucleotide
acaatctagcaacctc

SEQ ID NO: 1630 - DNA, 16 bp, Artificial sequence
  Synthetic oligonucleotide
tagcaagccaacagag

SEQ ID NO: 1631 - DNA, 16 bp, Artificial sequence
  Synthetic oligonucleotide
cataggcttagtgtag

SEQ ID NO: 1632 - DNA, 16 bp, Artificial sequence
  Synthetic oligonucleotide
gaattatttcttgcga

SEQ ID NO: 1633 - DNA, 16 bp, Artificial sequence
  Synthetic oligonucleotide
tcaaagcctgttggat

SEQ ID NO: 1634 - DNA, 16 bp, Artificial sequence
  Synthetic oligonucleotide
aggcattagatggtaa

SEQ ID NO: 1635 - DNA, 16 bp, Artificial sequence
  Synthetic oligonucleotide
tacttacttctgtagt

SEQ ID NO: 1636 - DNA, 16 bp, Artificial sequence
  Synthetic oligonucleotide
tagttagaatagtctt

SEQ ID NO: 1637 - DNA, 16 bp, Artificial sequence
  Synthetic oligonucleotide
gtaaattgaatagcca

SEQ ID NO: 1638 - DNA, 16 bp, Artificial sequence
  Synthetic oligonucleotide
cttatgaagttagtat

SEQ ID NO: 1639 - DNA, 16 bp, Artificial sequence
  Synthetic oligonucleotide
atatatacctgttgcc

SEQ ID NO: 1640 - DNA, 16 bp, Artificial sequence
  Synthetic oligonucleotide
gatgagtaggcaactg

SEQ ID NO: 1641 - DNA, 16 bp, Artificial sequence
  Synthetic oligonucleotide
tctattatgcactcta

SEQ ID NO: 1642 - DNA, 16 bp, Artificial sequence
  Synthetic oligonucleotide
gttcaaattggatgca

SEQ ID NO: 1643 - DNA, 16 bp, Artificial sequence
  Synthetic oligonucleotide
tctgattacagcatca

SEQ ID NO: 1644 - DNA, 16 bp, Artificial sequence
  Synthetic oligonucleotide
ctatagtaatcacaag

SEQ ID NO: 1645 - DNA, 16 bp, Artificial sequence
  Synthetic oligonucleotide
tttagaatacgctgag

SEQ ID NO: 1646 - DNA, 16 bp, Artificial sequence
  Synthetic oligonucleotide
ggttcagtccttgtgt

SEQ ID NO: 1647 - DNA, 16 bp, Artificial sequence
  Synthetic oligonucleotide
aagtaggagtagatga

SEQ ID NO: 1648 - DNA, 16 bp, Artificial sequence
  Synthetic oligonucleotide
tgagaacaatctcccc

SEQ ID NO: 1649 - DNA, 16 bp, Artificial sequence
  Synthetic oligonucleotide
acagaaccaatatgct

SEQ ID NO: 1650 - DNA, 16 bp, Artificial sequence
  Synthetic oligonucleotide
ttcggcactcagctgc

SEQ ID NO: 1651 - DNA, 16 bp, Artificial sequence
  Synthetic oligonucleotide
gatagatctcttctct

SEQ ID NO: 1652 - DNA, 16 bp, Artificial sequence
  Synthetic oligonucleotide
ttgttacatcacccac

SEQ ID NO: 1653 - DNA, 16 bp, Artificial sequence
  Synthetic oligonucleotide
ggatatactgtcccag

SEQ ID NO: 1654 - DNA, 16 bp, Artificial sequence
  Synthetic oligonucleotide
ggtaatctcttcatcc

SEQ ID NO: 1655 - DNA, 16 bp, Artificial sequence
  Synthetic oligonucleotide
aaaatgtcctaggatg

SEQ ID NO: 1656 - DNA, 16 bp, Artificial sequence
  Synthetic oligonucleotide
gacgatgtggccatga

SEQ ID NO: 1657 - DNA, 16 bp, Artificial sequence
  Synthetic oligonucleotide
aacaatatgggatgag

SEQ ID NO: 1658 - DNA, 16 bp, Artificial sequence
  Synthetic oligonucleotide
aagttctgatgtcaga

SEQ ID NO: 1659 - DNA, 16 bp, Artificial sequence
  Synthetic oligonucleotide
ataatcttgtgcttgg

SEQ ID NO: 1660 - DNA, 16 bp, Artificial sequence
  Synthetic oligonucleotide
acttcttacgacttca

SEQ ID NO: 1661 - DNA, 16 bp, Artificial sequence
  Synthetic oligonucleotide
tatacgatggaacaaa

SEQ ID NO: 1662 - DNA, 16 bp, Artificial sequence
  Synthetic oligonucleotide
catacgatttaaaatc

SEQ ID NO: 1663 - DNA, 16 bp, Artificial sequence
  Synthetic oligonucleotide
tggagcttatttattc

SEQ ID NO: 1664 - DNA, 16 bp, Artificial sequence
  Synthetic oligonucleotide
attcgaaactattcat

SEQ ID NO: 1665 - DNA, 16 bp, Artificial sequence
  Synthetic oligonucleotide
tgctgctagtgccaaa

SEQ ID NO: 1666 - DNA, 16 bp, Artificial sequence
  Synthetic oligonucleotide
tgtccacctttaaatg

SEQ ID NO: 1667 - DNA, 16 bp, Artificial sequence
  Synthetic oligonucleotide
aaaccttccctgtgta

SEQ ID NO: 1668 - DNA, 16 bp, Artificial sequence
  Synthetic oligonucleotide
acagattggaatgcta

SEQ ID NO: 1669 - DNA, 16 bp, Artificial sequence
  Synthetic oligonucleotide
gtgcactcattctgtg

SEQ ID NO: 1670 - DNA, 16 bp, Artificial sequence
  Synthetic oligonucleotide
ttgagataaagctgcc

SEQ ID NO: 1671 - DNA, 16 bp, Artificial sequence
  Synthetic oligonucleotide
tgcaccgttttgggct

SEQ ID NO: 1672 - DNA, 16 bp, Artificial sequence
  Synthetic oligonucleotide
tggtggacttcagagt

SEQ ID NO: 1673 - DNA, 16 bp, Artificial sequence
  Synthetic oligonucleotide
tgtatcttataagact

SEQ ID NO: 1674 - DNA, 16 bp, Artificial sequence
  Synthetic oligonucleotide
tgggaccaaggatata

SEQ ID NO: 1675 - DNA, 16 bp, Artificial sequence
  Synthetic oligonucleotide
cagtacagttcctttt

SEQ ID NO: 1676 - DNA, 16 bp, Artificial sequence
  Synthetic oligonucleotide
cttctcttgggtccat

SEQ ID NO: 1677 - DNA, 16 bp, Artificial sequence
  Synthetic oligonucleotide
aagattagtcttgatg

SEQ ID NO: 1678 - DNA, 16 bp, Artificial sequence
  Synthetic oligonucleotide
tcaccttattaatatc

SEQ ID NO: 1679 - DNA, 16 bp, Artificial sequence
  Synthetic oligonucleotide
aaaatcgctgcttagt

SEQ ID NO: 1680 - DNA, 16 bp, Artificial sequence
  Synthetic oligonucleotide
ggcactaaaggtttct

SEQ ID NO: 1681 - DNA, 16 bp, Artificial sequence
  Synthetic oligonucleotide
gttcattcgaatttct

SEQ ID NO: 1682 - DNA, 16 bp, Artificial sequence
  Synthetic oligonucleotide
agccttagagtgaatc

SEQ ID NO: 1683 - DNA, 16 bp, Artificial sequence
  Synthetic oligonucleotide
cccaacgcaacagttt

SEQ ID NO: 1684 - DNA, 16 bp, Artificial sequence
  Synthetic oligonucleotide
aataggagagtctttc

SEQ ID NO: 1685 - DNA, 16 bp, Artificial sequence
  Synthetic oligonucleotide
tatttagggcaaacct

SEQ ID NO: 1686 - DNA, 16 bp, Artificial sequence
  Synthetic oligonucleotide
cataaccataggacat

SEQ ID NO: 1687 - DNA, 16 bp, Artificial sequence
  Synthetic oligonucleotide
gctaagtagtaattct

SEQ ID NO: 1688 - DNA, 16 bp, Artificial sequence
  Synthetic oligonucleotide
gattagttaacctttt

SEQ ID NO: 1689 - DNA, 16 bp, Artificial sequence
  Synthetic oligonucleotide
taataatgggcagagc

SEQ ID NO: 1690 - DNA, 16 bp, Artificial sequence
  Synthetic oligonucleotide
acagagttattgtagg

SEQ ID NO: 1691 - DNA, 16 bp, Artificial sequence
  Synthetic oligonucleotide
attgtatgaggtctct

SEQ ID NO: 1692 - DNA, 16 bp, Artificial sequence
  Synthetic oligonucleotide
cagaagtatgtgaact

SEQ ID NO: 1693 - DNA, 16 bp, Artificial sequence
  Synthetic oligonucleotide
ctatatacatccaagt

SEQ ID NO: 1694 - DNA, 16 bp, Artificial sequence
  Synthetic oligonucleotide
ctaatattgaggcact

SEQ ID NO: 1695 - DNA, 16 bp, Artificial sequence
  Synthetic oligonucleotide
gctataggtagctaat

SEQ ID NO: 1696 - DNA, 16 bp, Artificial sequence
  Synthetic oligonucleotide
cacactaatgaatcat

SEQ ID NO: 1697 - DNA, 16 bp, Artificial sequence
  Synthetic oligonucleotide
caacactaatctcagt

SEQ ID NO: 1698 - DNA, 16 bp, Artificial sequence
  Synthetic oligonucleotide
ataacatggctggcat

SEQ ID NO: 1699 - DNA, 16 bp, Artificial sequence
  Synthetic oligonucleotide
catagacatgtgttca

SEQ ID NO: 1700 - DNA, 16 bp, Artificial sequence
  Synthetic oligonucleotide
tgacaatggttgatag

SEQ ID NO: 1701 - DNA, 16 bp, Artificial sequence
  Synthetic oligonucleotide
gtatcatttggcttaa

SEQ ID NO: 1702 - DNA, 16 bp, Artificial sequence
  Synthetic oligonucleotide
ttctattagttggcct

SEQ ID NO: 1703 - DNA, 16 bp, Artificial sequence
  Synthetic oligonucleotide
taattttcgggttctt

SEQ ID NO: 1704 - DNA, 16 bp, Artificial sequence
  Synthetic oligonucleotide
ggattaattcccttcc

SEQ ID NO: 1705 - DNA, 16 bp, Artificial sequence
  Synthetic oligonucleotide
gatagagcacatggcc

SEQ ID NO: 1706 - DNA, 16 bp, Artificial sequence
  Synthetic oligonucleotide
cacgaagcctgaatgc

SEQ ID NO: 1707 - DNA, 16 bp, Artificial sequence
  Synthetic oligonucleotide
cacaatctagcaacct

SEQ ID NO: 1708 - DNA, 16 bp, Artificial sequence
  Synthetic oligonucleotide
gaatagcaagccaaca

SEQ ID NO: 1709 - DNA, 16 bp, Artificial sequence
  Synthetic oligonucleotide
acataggcttagtgta

SEQ ID NO: 1710 - DNA, 16 bp, Artificial sequence
  Synthetic oligonucleotide
cgaattatttcttgcg

SEQ ID NO: 1711 - DNA, 16 bp, Artificial sequence
  Synthetic oligonucleotide
ctcaaagcctgttgga

SEQ ID NO: 1712 - DNA, 16 bp, Artificial sequence
  Synthetic oligonucleotide
aaaatggtggcgaggc

SEQ ID NO: 1713 - DNA, 16 bp, Artificial sequence
  Synthetic oligonucleotide
gtacttacttctgtag

SEQ ID NO: 1714 - DNA, 16 bp, Artificial sequence
  Synthetic oligonucleotide
ttagttagaatagtct

SEQ ID NO: 1715 - DNA, 16 bp, Artificial sequence
  Synthetic oligonucleotide
agtaaattgaatagcc

SEQ ID NO: 1716 - DNA, 16 bp, Artificial sequence
  Synthetic oligonucleotide
gcttatgaagttagta

SEQ ID NO: 1717 - DNA, 16 bp, Artificial sequence
  Synthetic oligonucleotide
cgtaaaattgtgtctc

SEQ ID NO: 1718 - DNA, 16 bp, Artificial sequence
  Synthetic oligonucleotide
gcataagagatgagta

SEQ ID NO: 1719 - DNA, 16 bp, Artificial sequence
  Synthetic oligonucleotide
atctattatgcactct

SEQ ID NO: 1720 - DNA, 16 bp, Artificial sequence
  Synthetic oligonucleotide
catagttcaaattgga

SEQ ID NO: 1721 - DNA, 16 bp, Artificial sequence
  Synthetic oligonucleotide
gggaaaaagtgtgttc

SEQ ID NO: 1722 - DNA, 16 bp, Artificial sequence
  Synthetic oligonucleotide
gtaattgctatagtaa

SEQ ID NO: 1723 - DNA, 16 bp, Artificial sequence
  Synthetic oligonucleotide
atttagaatacgctga

SEQ ID NO: 1724 - DNA, 16 bp, Artificial sequence
  Synthetic oligonucleotide
tggttcagtccttgtg

SEQ ID NO: 1725 - DNA, 16 bp, Artificial sequence
  Synthetic oligonucleotide
caagtaggagtagatg

SEQ ID NO: 1726 - DNA, 16 bp, Artificial sequence
  Synthetic oligonucleotide
atgagaacaatctccc

SEQ ID NO: 1727 - DNA, 16 bp, Artificial sequence
  Synthetic oligonucleotide
cacagaaccaatatgc

SEQ ID NO: 1728 - DNA, 16 bp, Artificial sequence
  Synthetic oligonucleotide
tttcggcactcagctg

SEQ ID NO: 1729 - DNA, 16 bp, Artificial sequence
  Synthetic oligonucleotide
cgatagatctcttctc

SEQ ID NO: 1730 - DNA, 16 bp, Artificial sequence
  Synthetic oligonucleotide
gattgttacatcaccc

SEQ ID NO: 1731 - DNA, 16 bp, Artificial sequence
  Synthetic oligonucleotide
tggatatactgtccca

SEQ ID NO: 1732 - DNA, 16 bp, Artificial sequence
  Synthetic oligonucleotide
tggtaatctcttcatc

SEQ ID NO: 1733 - DNA, 16 bp, Artificial sequence
  Synthetic oligonucleotide
ccaaaaatgtcctagg

SEQ ID NO: 1734 - DNA, 16 bp, Artificial sequence
  Synthetic oligonucleotide
tgtgacgatgtggcca

SEQ ID NO: 1735 - DNA, 16 bp, Artificial sequence
  Synthetic oligonucleotide
gaacaatatgggatga

SEQ ID NO: 1736 - DNA, 16 bp, Artificial sequence
  Synthetic oligonucleotide
gaagttctgatgtcag

SEQ ID NO: 1737 - DNA, 16 bp, Artificial sequence
  Synthetic oligonucleotide
cataatcttgtgcttg

SEQ ID NO: 1738 - DNA, 16 bp, Artificial sequence
  Synthetic oligonucleotide
gacttcttacgacttc

SEQ ID NO: 1739 - DNA, 16 bp, Artificial sequence
  Synthetic oligonucleotide
atatacgatggaacaa

SEQ ID NO: 1740 - DNA, 16 bp, Artificial sequence
  Synthetic oligonucleotide
gcatacgatttaaaat

SEQ ID NO: 1741 - DNA, 16 bp, Artificial sequence
  Synthetic oligonucleotide
gctggagcttatttat

SEQ ID NO: 1742 - DNA, 16 bp, Artificial sequence
  Synthetic oligonucleotide
gattcgaaactattca

SEQ ID NO: 1743 - DNA, 16 bp, Artificial sequence
  Synthetic oligonucleotide
ctgctgctagtgccaa

SEQ ID NO: 1744 - DNA, 16 bp, Artificial sequence
  Synthetic oligonucleotide
gcttttgtccaccttt

SEQ ID NO: 1745 - DNA, 16 bp, Artificial sequence
  Synthetic oligonucleotide
taaaccttccctgtgt

SEQ ID NO: 1746 - DNA, 16 bp, Artificial sequence
  Synthetic oligonucleotide
tacagattggaatgct

SEQ ID NO: 1747 - DNA, 16 bp, Artificial sequence
  Synthetic oligonucleotide
tgtgcactcattctgt

SEQ ID NO: 1748 - DNA, 16 bp, Artificial sequence
  Synthetic oligonucleotide
gttgagataaagctgc

SEQ ID NO: 1749 - DNA, 16 bp, Artificial sequence
  Synthetic oligonucleotide
ttgcaccgttttgggc

SEQ ID NO: 1750 - DNA, 16 bp, Artificial sequence
  Synthetic oligonucleotide
ttggtggacttcagag

SEQ ID NO: 1751 - DNA, 16 bp, Artificial sequence
  Synthetic oligonucleotide
atgtatcttataagac

SEQ ID NO: 1752 - DNA, 16 bp, Artificial sequence
  Synthetic oligonucleotide
ctgggaccaaggatat

SEQ ID NO: 1753 - DNA, 16 bp, Artificial sequence
  Synthetic oligonucleotide
ccagtacagttccttt

SEQ ID NO: 1754 - DNA, 16 bp, Artificial sequence
  Synthetic oligonucleotide
tcttctcttgggtcca

SEQ ID NO: 1755 - DNA, 16 bp, Artificial sequence
  Synthetic oligonucleotide
caagattagtcttgat

SEQ ID NO: 1756 - DNA, 16 bp, Artificial sequence
  Synthetic oligonucleotide
taccttattaatatcc

SEQ ID NO: 1757 - DNA, 16 bp, Artificial sequence
  Synthetic oligonucleotide
aaaaatcgctgcttag

SEQ ID NO: 1758 - DNA, 16 bp, Artificial sequence
  Synthetic oligonucleotide
gactacggactggcaa

SEQ ID NO: 1759 - DNA, 16 bp, Artificial sequence
  Synthetic oligonucleotide
agaaagttcattcgaa

SEQ ID NO: 1760 - DNA, 16 bp, Artificial sequence
  Synthetic oligonucleotide
ttacagccttagagtg

SEQ ID NO: 1761 - DNA, 16 bp, Artificial sequence
  Synthetic oligonucleotide
tttgaaccgtattccc

SEQ ID NO: 1762 - DNA, 16 bp, Artificial sequence
  Synthetic oligonucleotide
gaataggagagtcttt

SEQ ID NO: 1763 - DNA, 16 bp, Artificial sequence
  Synthetic oligonucleotide
attgagatgacagtgg

SEQ ID NO: 1764 - DNA, 16 bp, Artificial sequence
  Synthetic oligonucleotide
ccataaccataggaca

SEQ ID NO: 1765 - DNA, 16 bp, Artificial sequence
  Synthetic oligonucleotide
tgctaagtagtaattc

SEQ ID NO: 1766 - DNA, 16 bp, Artificial sequence
  Synthetic oligonucleotide
aagattagttaacctt

SEQ ID NO: 1767 - DNA, 16 bp, Artificial sequence
  Synthetic oligonucleotide
caataataatgggcag

SEQ ID NO: 1768 - DNA, 16 bp, Artificial sequence
  Synthetic oligonucleotide
gagtcataatttgctt

SEQ ID NO: 1769 - DNA, 16 bp, Artificial sequence
  Synthetic oligonucleotide
ctattgtatgaggtct

SEQ ID NO: 1770 - DNA, 16 bp, Artificial sequence
  Synthetic oligonucleotide
ccagaagtatgtgaac

SEQ ID NO: 1771 - DNA, 16 bp, Artificial sequence
  Synthetic oligonucleotide
cctatatacatccaag

SEQ ID NO: 1772 - DNA, 16 bp, Artificial sequence
  Synthetic oligonucleotide
actaatattgaggcac

SEQ ID NO: 1773 - DNA, 16 bp, Artificial sequence
  Synthetic oligonucleotide
agctataggtagctaa

SEQ ID NO: 1774 - DNA, 16 bp, Artificial sequence
  Synthetic oligonucleotide
ccacactaatgaatca

SEQ ID NO: 1775 - DNA, 16 bp, Artificial sequence
  Synthetic oligonucleotide
tatggtaagccccatg

SEQ ID NO: 1776 - DNA, 16 bp, Artificial sequence
  Synthetic oligonucleotide
atataacatggctggc

SEQ ID NO: 1777 - DNA, 16 bp, Artificial sequence
  Synthetic oligonucleotide
acatagacatgtgttc

SEQ ID NO: 1778 - DNA, 16 bp, Artificial sequence
  Synthetic oligonucleotide
ctcaataactgagtta

SEQ ID NO: 1779 - DNA, 16 bp, Artificial sequence
  Synthetic oligonucleotide
gagaaggcggtatcat

SEQ ID NO: 1780 - DNA, 16 bp, Artificial sequence
  Synthetic oligonucleotide
cttctattagttggcc

SEQ ID NO: 1781 - DNA, 16 bp, Artificial sequence
  Synthetic oligonucleotide
ttaattttcgggttct

SEQ ID NO: 1782 - DNA, 16 bp, Artificial sequence
  Synthetic oligonucleotide
aggattaattcccttc

SEQ ID NO: 1783 - DNA, 16 bp, Artificial sequence
  Synthetic oligonucleotide
ggatagagcacatggc

SEQ ID NO: 1784 - DNA, 16 bp, Artificial sequence
  Synthetic oligonucleotide
gtacacgaagcctgaa

SEQ ID NO: 1785 - DNA, 16 bp, Artificial sequence
  Synthetic oligonucleotide
tcacaatctagcaacc

SEQ ID NO: 1786 - DNA, 16 bp, Artificial sequence
  Synthetic oligonucleotide
tgaatagcaagccaac

SEQ ID NO: 1787 - DNA, 16 bp, Artificial sequence
  Synthetic oligonucleotide
aaacataggcttagtg

SEQ ID NO: 1788 - DNA, 16 bp, Artificial sequence
  Synthetic oligonucleotide
aatacccttggtggag

SEQ ID NO: 1789 - DNA, 16 bp, Artificial sequence
  Synthetic oligonucleotide
taatcatgggacagga

SEQ ID NO: 1790 - DNA, 16 bp, Artificial sequence
  Synthetic oligonucleotide
caaaatggtggcgagg

SEQ ID NO: 1791 - DNA, 16 bp, Artificial sequence
  Synthetic oligonucleotide
gtatttgggtgttctg

SEQ ID NO: 1792 - DNA, 16 bp, Artificial sequence
  Synthetic oligonucleotide
tttagttagaatagtc

SEQ ID NO: 1793 - DNA, 16 bp, Artificial sequence
  Synthetic oligonucleotide
gtacaaatttatgcca

SEQ ID NO: 1794 - DNA, 16 bp, Artificial sequence
  Synthetic oligonucleotide
ggcttatgaagttagt

SEQ ID NO: 1795 - DNA, 16 bp, Artificial sequence
  Synthetic oligonucleotide
taattgcatctgctcg

SEQ ID NO: 1796 - DNA, 16 bp, Artificial sequence
  Synthetic oligonucleotide
tgcataagagatgagt

SEQ ID NO: 1797 - DNA, 16 bp, Artificial sequence
  Synthetic oligonucleotide
tatctattatgcactc

SEQ ID NO: 1798 - DNA, 16 bp, Artificial sequence
  Synthetic oligonucleotide
tcatagttcaaattgg

SEQ ID NO: 1799 - DNA, 16 bp, Artificial sequence
  Synthetic oligonucleotide
caattatgaatctgca

SEQ ID NO: 1800 - DNA, 16 bp, Artificial sequence
  Synthetic oligonucleotide
agtaattgctatagta

SEQ ID NO: 1801 - DNA, 16 bp, Artificial sequence
  Synthetic oligonucleotide
catttagaatacgctg

SEQ ID NO: 1802 - DNA, 16 bp, Artificial sequence
  Synthetic oligonucleotide
ctggttcagtccttgt

SEQ ID NO: 1803 - DNA, 16 bp, Artificial sequence
  Synthetic oligonucleotide
ccaagtaggagtagat

SEQ ID NO: 1804 - DNA, 16 bp, Artificial sequence
  Synthetic oligonucleotide
gtaatgagaacaatct

SEQ ID NO: 1805 - DNA, 16 bp, Artificial sequence
  Synthetic oligonucleotide
ccacagaaccaatatg

SEQ ID NO: 1806 - DNA, 16 bp, Artificial sequence
  Synthetic oligonucleotide
ttttcggcactcagct

SEQ ID NO: 1807 - DNA, 16 bp, Artificial sequence
  Synthetic oligonucleotide
gcgatagatctcttct

SEQ ID NO: 1808 - DNA, 16 bp, Artificial sequence
  Synthetic oligonucleotide
cgattgttacatcacc

SEQ ID NO: 1809 - DNA, 16 bp, Artificial sequence
  Synthetic oligonucleotide
ctggatatactgtccc

SEQ ID NO: 1810 - DNA, 16 bp, Artificial sequence
  Synthetic oligonucleotide
gtcttggtaatctctt

SEQ ID NO: 1811 - DNA, 16 bp, Artificial sequence
  Synthetic oligonucleotide
gcttttgtgatccaaa

SEQ ID NO: 1812 - DNA, 16 bp, Artificial sequence
  Synthetic oligonucleotide
ctgtgacgatgtggcc

SEQ ID NO: 1813 - DNA, 16 bp, Artificial sequence
  Synthetic oligonucleotide
ggaacaatatgggatg

SEQ ID NO: 1814 - DNA, 16 bp, Artificial sequence
  Synthetic oligonucleotide
ggcctgaagttctgat

SEQ ID NO: 1815 - DNA, 16 bp, Artificial sequence
  Synthetic oligonucleotide
ccataatcttgtgctt

SEQ ID NO: 1816 - DNA, 16 bp, Artificial sequence
  Synthetic oligonucleotide
agacttcttacgactt

SEQ ID NO: 1817 - DNA, 16 bp, Artificial sequence
  Synthetic oligonucleotide
gatatacgatggaaca

SEQ ID NO: 1818 - DNA, 16 bp, Artificial sequence
  Synthetic oligonucleotide
tgcatacgatttaaaa

SEQ ID NO: 1819 - DNA, 16 bp, Artificial sequence
  Synthetic oligonucleotide
ggctggagcttattta

SEQ ID NO: 1820 - DNA, 16 bp, Artificial sequence
  Synthetic oligonucleotide
tgattcgaaactattc

SEQ ID NO: 1821 - DNA, 16 bp, Artificial sequence
  Synthetic oligonucleotide
actgctgctagtgcca

SEQ ID NO: 1822 - DNA, 16 bp, Artificial sequence
  Synthetic oligonucleotide
agcttttgtccacctt

SEQ ID NO: 1823 - DNA, 16 bp, Artificial sequence
  Synthetic oligonucleotide
cttaaaccttccctgt

SEQ ID NO: 1824 - DNA, 16 bp, Artificial sequence
  Synthetic oligonucleotide
ctacagattggaatgc

SEQ ID NO: 1825 - DNA, 16 bp, Artificial sequence
  Synthetic oligonucleotide
ctgtgcactcattctg

SEQ ID NO: 1826 - DNA, 16 bp, Artificial sequence
  Synthetic oligonucleotide
ggttgagataaagctg

SEQ ID NO: 1827 - DNA, 16 bp, Artificial sequence
  Synthetic oligonucleotide
gttgcaccgttttggg

SEQ ID NO: 1828 - DNA, 16 bp, Artificial sequence
  Synthetic oligonucleotide
tttggtggacttcaga

SEQ ID NO: 1829 - DNA, 16 bp, Artificial sequence
  Synthetic oligonucleotide
cacctttcataatgta

SEQ ID NO: 1830 - DNA, 16 bp, Artificial sequence
  Synthetic oligonucleotide
tctgggaccaaggata

SEQ ID NO: 1831 - DNA, 16 bp, Artificial sequence
  Synthetic oligonucleotide
gccagtacagttcctt

SEQ ID NO: 1832 - DNA, 16 bp, Artificial sequence
  Synthetic oligonucleotide
gtcggattattttttc

SEQ ID NO: 1833 - DNA, 16 bp, Artificial sequence
  Synthetic oligonucleotide
acaagattagtcttga

SEQ ID NO: 1834 - DNA, 16 bp, Artificial sequence
  Synthetic oligonucleotide
gatgtatacattacct

SEQ ID NO: 1835 - DNA, 16 bp, Artificial sequence
  Synthetic oligonucleotide
ataaaaatcgctgctt

SEQ ID NO: 1836 - DNA, 16 bp, Artificial sequence
  Synthetic oligonucleotide
atcatatgctaagtgc

SEQ ID NO: 1837 - DNA, 16 bp, Artificial sequence
  Synthetic oligonucleotide
cagaaagttcattcga

SEQ ID NO: 1838 - DNA, 16 bp, Artificial sequence
  Synthetic oligonucleotide
tacattacagccttag

SEQ ID NO: 1839 - DNA, 16 bp, Artificial sequence
  Synthetic oligonucleotide
gttttttgaaccgtat

SEQ ID NO: 1840 - DNA, 16 bp, Artificial sequence
  Synthetic oligonucleotide
agaataggagagtctt

SEQ ID NO: 1841 - DNA, 16 bp, Artificial sequence
  Synthetic oligonucleotide
gtattgagatgacagt

SEQ ID NO: 1842 - DNA, 16 bp, Artificial sequence
  Synthetic oligonucleotide
cccataaccataggac

SEQ ID NO: 1843 - DNA, 16 bp, Artificial sequence
  Synthetic oligonucleotide
gcagtaaagtgctaag

SEQ ID NO: 1844 - DNA, 16 bp, Artificial sequence
  Synthetic oligonucleotide
gaagattagttaacct

SEQ ID NO: 1845 - DNA, 16 bp, Artificial sequence
  Synthetic oligonucleotide
catattccctgatgat

SEQ ID NO: 1846 - DNA, 16 bp, Artificial sequence
  Synthetic oligonucleotide
aactacatgacctggg

SEQ ID NO: 1847 - DNA, 16 bp, Artificial sequence
  Synthetic oligonucleotide
ttctattgtatgaggt

SEQ ID NO: 1848 - DNA, 16 bp, Artificial sequence
  Synthetic oligonucleotide
gtccagaagtatgtga

SEQ ID NO: 1849 - DNA, 16 bp, Artificial sequence
  Synthetic oligonucleotide
tcctatatacatccaa

SEQ ID NO: 1850 - DNA, 16 bp, Artificial sequence
  Synthetic oligonucleotide
cactaatattgaggca

SEQ ID NO: 1851 - DNA, 16 bp, Artificial sequence
  Synthetic oligonucleotide
cagctataggtagcta

SEQ ID NO: 1852 - DNA, 16 bp, Artificial sequence
  Synthetic oligonucleotide
tagtgtaagctgagag

SEQ ID NO: 1853 - DNA, 16 bp, Artificial sequence
  Synthetic oligonucleotide
gtatggtaagccccat

SEQ ID NO: 1854 - DNA, 16 bp, Artificial sequence
  Synthetic oligonucleotide
tatataacatggctgg

SEQ ID NO: 1855 - DNA, 16 bp, Artificial sequence
  Synthetic oligonucleotide
tgacatagacatgtgt

SEQ ID NO: 1856 - DNA, 16 bp, Artificial sequence
  Synthetic oligonucleotide
ctgtaggactctgctc

SEQ ID NO: 1857 - DNA, 16 bp, Artificial sequence
  Synthetic oligonucleotide
tgagaaggcggtatca

SEQ ID NO: 1858 - DNA, 16 bp, Artificial sequence
  Synthetic oligonucleotide
ccctaatgtgttttcc

SEQ ID NO: 1859 - DNA, 16 bp, Artificial sequence
  Synthetic oligonucleotide
cttaattttcgggttc

SEQ ID NO: 1860 - DNA, 16 bp, Artificial sequence
  Synthetic oligonucleotide
taggattaattccctt

SEQ ID NO: 1861 - DNA, 16 bp, Artificial sequence
  Synthetic oligonucleotide
aatacaggatagagca

SEQ ID NO: 1862 - DNA, 16 bp, Artificial sequence
  Synthetic oligonucleotide
taggaaagctcatggt

SEQ ID NO: 1863 - DNA, 16 bp, Artificial sequence
  Synthetic oligonucleotide
ggaaattcacaatcta

SEQ ID NO: 1864 - DNA, 16 bp, Artificial sequence
  Synthetic oligonucleotide
ttgaatagcaagccaa

SEQ ID NO: 1865 - DNA, 16 bp, Artificial sequence
  Synthetic oligonucleotide
taaacataggcttagt

SEQ ID NO: 1866 - DNA, 16 bp, Artificial sequence
  Synthetic oligonucleotide
taaatacccttggtgg

SEQ ID NO: 1867 - DNA, 16 bp, Artificial sequence
  Synthetic oligonucleotide
ttaatcatgggacagg

SEQ ID NO: 1868 - DNA, 16 bp, Artificial sequence
  Synthetic oligonucleotide
tcaaaatggtggcgag

SEQ ID NO: 1869 - DNA, 16 bp, Artificial sequence
  Synthetic oligonucleotide
agtatttgggtgttct

SEQ ID NO: 1870 - DNA, 16 bp, Artificial sequence
  Synthetic oligonucleotide
tcactatattgcattc

SEQ ID NO: 1871 - DNA, 16 bp, Artificial sequence
  Synthetic oligonucleotide
agggaatgttatgtac

SEQ ID NO: 1872 - DNA, 16 bp, Artificial sequence
  Synthetic oligonucleotide
aaaaggcccaaggctt

SEQ ID NO: 1873 - DNA, 16 bp, Artificial sequence
  Synthetic oligonucleotide
gtaattgcatctgctc

SEQ ID NO: 1874 - DNA, 16 bp, Artificial sequence
  Synthetic oligonucleotide
atgcataagagatgag

SEQ ID NO: 1875 - DNA, 16 bp, Artificial sequence
  Synthetic oligonucleotide
ctatgcaagccttcac

SEQ ID NO: 1876 - DNA, 16 bp, Artificial sequence
  Synthetic oligonucleotide
gtaatattcatagttc

SEQ ID NO: 1877 - DNA, 16 bp, Artificial sequence
  Synthetic oligonucleotide
ccaattatgaatctgc

SEQ ID NO: 1878 - DNA, 16 bp, Artificial sequence
  Synthetic oligonucleotide
tagtaattgctatagt

SEQ ID NO: 1879 - DNA, 16 bp, Artificial sequence
  Synthetic oligonucleotide
tcatttagaatacgct

SEQ ID NO: 1880 - DNA, 16 bp, Artificial sequence
  Synthetic oligonucleotide
ccttctggttcagtcc

SEQ ID NO: 1881 - DNA, 16 bp, Artificial sequence
  Synthetic oligonucleotide
tccaagtaggagtaga

SEQ ID NO: 1882 - DNA, 16 bp, Artificial sequence
  Synthetic oligonucleotide
agtaatgagaacaatc

SEQ ID NO: 1883 - DNA, 16 bp, Artificial sequence
  Synthetic oligonucleotide
cccacagaaccaatat

SEQ ID NO: 1884 - DNA, 16 bp, Artificial sequence
  Synthetic oligonucleotide
gttttcggcactcagc

SEQ ID NO: 1885 - DNA, 16 bp, Artificial sequence
  Synthetic oligonucleotide
agcgatagatctcttc

SEQ ID NO: 1886 - DNA, 16 bp, Artificial sequence
  Synthetic oligonucleotide
acgattgttacatcac

SEQ ID NO: 1887 - DNA, 16 bp, Artificial sequence
  Synthetic oligonucleotide
gctggatatactgtcc

SEQ ID NO: 1888 - DNA, 16 bp, Artificial sequence
  Synthetic oligonucleotide
atgtcttggtaatctc

SEQ ID NO: 1889 - DNA, 16 bp, Artificial sequence
  Synthetic oligonucleotide
gtgcttttgtgatcca

SEQ ID NO: 1890 - DNA, 16 bp, Artificial sequence
  Synthetic oligonucleotide
actgtgacgatgtggc

SEQ ID NO: 1891 - DNA, 16 bp, Artificial sequence
  Synthetic oligonucleotide
tggaacaatatgggat

SEQ ID NO: 1892 - DNA, 16 bp, Artificial sequence
  Synthetic oligonucleotide
aaggcctgaagttctg

SEQ ID NO: 1893 - DNA, 16 bp, Artificial sequence
  Synthetic oligonucleotide
aggccataatcttgtg

SEQ ID NO: 1894 - DNA, 16 bp, Artificial sequence
  Synthetic oligonucleotide
cagacttcttacgact

SEQ ID NO: 1895 - DNA, 16 bp, Artificial sequence
  Synthetic oligonucleotide
tgatatacgatggaac

SEQ ID NO: 1896 - DNA, 16 bp, Artificial sequence
  Synthetic oligonucleotide
ctgcatacgatttaaa

SEQ ID NO: 1897 - DNA, 16 bp, Artificial sequence
  Synthetic oligonucleotide
tggctggagcttattt

SEQ ID NO: 1898 - DNA, 16 bp, Artificial sequence
  Synthetic oligonucleotide
ttgattcgaaactatt

SEQ ID NO: 1899 - DNA, 16 bp, Artificial sequence
  Synthetic oligonucleotide
gactgctgctagtgcc

SEQ ID NO: 1900 - DNA, 16 bp, Artificial sequence
  Synthetic oligonucleotide
tagcttttgtccacct

SEQ ID NO: 1901 - DNA, 16 bp, Artificial sequence
  Synthetic oligonucleotide
gtcttaaaccttccct

SEQ ID NO: 1902 - DNA, 16 bp, Artificial sequence
  Synthetic oligonucleotide
gctacagattggaatg

SEQ ID NO: 1903 - DNA, 16 bp, Artificial sequence
  Synthetic oligonucleotide
agctgtgcactcattc

SEQ ID NO: 1904 - DNA, 16 bp, Artificial sequence
  Synthetic oligonucleotide
aggttgagataaagct

SEQ ID NO: 1905 - DNA, 16 bp, Artificial sequence
  Synthetic oligonucleotide
agttgcaccgttttgg

SEQ ID NO: 1906 - DNA, 16 bp, Artificial sequence
  Synthetic oligonucleotide
cttttggtggacttca

SEQ ID NO: 1907 - DNA, 16 bp, Artificial sequence
  Synthetic oligonucleotide
gtcacctttcataatg

SEQ ID NO: 1908 - DNA, 16 bp, Artificial sequence
  Synthetic oligonucleotide
ctctgggaccaaggat

SEQ ID NO: 1909 - DNA, 16 bp, Artificial sequence
  Synthetic oligonucleotide
agccagtacagttcct

SEQ ID NO: 1910 - DNA, 16 bp, Artificial sequence
  Synthetic oligonucleotide
agtcggattatttttt

SEQ ID NO: 1911 - DNA, 16 bp, Artificial sequence
  Synthetic oligonucleotide
aacaagattagtcttg

SEQ ID NO: 1912 - DNA, 16 bp, Artificial sequence
  Synthetic oligonucleotide
catatcttactctgtg

SEQ ID NO: 1913 - DNA, 16 bp, Artificial sequence
  Synthetic oligonucleotide
cataaaaatcgctgct

SEQ ID NO: 1914 - DNA, 16 bp, Artificial sequence
  Synthetic oligonucleotide
cgtttatcatatgcta

SEQ ID NO: 1915 - DNA, 16 bp, Artificial sequence
  Synthetic oligonucleotide
ccagaaagttcattcg

SEQ ID NO: 1916 - DNA, 16 bp, Artificial sequence
  Synthetic oligonucleotide
ttacattacagcctta

SEQ ID NO: 1917 - DNA, 16 bp, Artificial sequence
  Synthetic oligonucleotide
ttaaactccaatgtgt

SEQ ID NO: 1918 - DNA, 16 bp, Artificial sequence
  Synthetic oligonucleotide
ctcaaatagccttttg

SEQ ID NO: 1919 - DNA, 16 bp, Artificial sequence
  Synthetic oligonucleotide
cctgaaaagccctatt

SEQ ID NO: 1920 - DNA, 16 bp, Artificial sequence
  Synthetic oligonucleotide
accaaacttgcccata

SEQ ID NO: 1921 - DNA, 16 bp, Artificial sequence
  Synthetic oligonucleotide
ggcagtaaagtgctaa

SEQ ID NO: 1922 - DNA, 16 bp, Artificial sequence
  Synthetic oligonucleotide
tgaagattagttaacc

SEQ ID NO: 1923 - DNA, 16 bp, Artificial sequence
  Synthetic oligonucleotide
atccatattccctgat

SEQ ID NO: 1924 - DNA, 16 bp, Artificial sequence
  Synthetic oligonucleotide
taactacatgacctgg

SEQ ID NO: 1925 - DNA, 16 bp, Artificial sequence
  Synthetic oligonucleotide
gatgagagtctttctt

SEQ ID NO: 1926 - DNA, 16 bp, Artificial sequence
  Synthetic oligonucleotide
aaagatctggccagtt

SEQ ID NO: 1927 - DNA, 16 bp, Artificial sequence
  Synthetic oligonucleotide
atcctatatacatcca

SEQ ID NO: 1928 - DNA, 16 bp, Artificial sequence
  Synthetic oligonucleotide
acactaatattgaggc

SEQ ID NO: 1929 - DNA, 16 bp, Artificial sequence
  Synthetic oligonucleotide
gaacatacattgttgc

SEQ ID NO: 1930 - DNA, 16 bp, Artificial sequence
  Synthetic oligonucleotide
gttgagtagtgtaagc

SEQ ID NO: 1931 - DNA, 16 bp, Artificial sequence
  Synthetic oligonucleotide
ttattggtatggtaag

SEQ ID NO: 1932 - DNA, 16 bp, Artificial sequence
  Synthetic oligonucleotide
gtaattggctcttgag

SEQ ID NO: 1933 - DNA, 16 bp, Artificial sequence
  Synthetic oligonucleotide
atgacatagacatgtg

SEQ ID NO: 1934 - DNA, 16 bp, Artificial sequence
  Synthetic oligonucleotide
ctacaaaactggtatc

SEQ ID NO: 1935 - DNA, 16 bp, Artificial sequence
  Synthetic oligonucleotide
accaatcctcagcttt

SEQ ID NO: 1936 - DNA, 16 bp, Artificial sequence
  Synthetic oligonucleotide
gatcattcctgctagt

SEQ ID NO: 1937 - DNA, 16 bp, Artificial sequence
  Synthetic oligonucleotide
gcttaattttcgggtt

SEQ ID NO: 1938 - DNA, 16 bp, Artificial sequence
  Synthetic oligonucleotide
ttaggattaattccct

SEQ ID NO: 1939 - DNA, 16 bp, Artificial sequence
  Synthetic oligonucleotide
acaatacaggatagag

SEQ ID NO: 1940 - DNA, 16 bp, Artificial sequence
  Synthetic oligonucleotide
ttaggaaagctcatgg

SEQ ID NO: 1941 - DNA, 16 bp, Artificial sequence
  Synthetic oligonucleotide
cttactaaggaaattc

SEQ ID NO: 1942 - DNA, 16 bp, Artificial sequence
  Synthetic oligonucleotide
ccttgaatagcaagcc

SEQ ID NO: 1943 - DNA, 16 bp, Artificial sequence
  Synthetic oligonucleotide
ataaacataggcttag

SEQ ID NO: 1944 - DNA, 16 bp, Artificial sequence
  Synthetic oligonucleotide
tctaaatacccttggt

SEQ ID NO: 1945 - DNA, 16 bp, Artificial sequence
  Synthetic oligonucleotide
attaatcatgggacag

SEQ ID NO: 1946 - DNA, 16 bp, Artificial sequence
  Synthetic oligonucleotide
atcaaaatggtggcga

SEQ ID NO: 1947 - DNA, 16 bp, Artificial sequence
  Synthetic oligonucleotide
tagtatttgggtgttc

SEQ ID NO: 1948 - DNA, 16 bp, Artificial sequence
  Synthetic oligonucleotide
accaaacttccagcag

SEQ ID NO: 1949 - DNA, 16 bp, Artificial sequence
  Synthetic oligonucleotide
caaaacctttgttgcc

SEQ ID NO: 1950 - DNA, 16 bp, Artificial sequence
  Synthetic oligonucleotide
tcaaaaaggcccaagg

SEQ ID NO: 1951 - DNA, 16 bp, Artificial sequence
  Synthetic oligonucleotide
agtaattgcatctgct

SEQ ID NO: 1952 - DNA, 16 bp, Artificial sequence
  Synthetic oligonucleotide
caggaatgcataagag

SEQ ID NO: 1953 - DNA, 16 bp, Artificial sequence
  Synthetic oligonucleotide
accagaatccattcta

SEQ ID NO: 1954 - DNA, 16 bp, Artificial sequence
  Synthetic oligonucleotide
aatcaatctgtctgaa

SEQ ID NO: 1955 - DNA, 16 bp, Artificial sequence
  Synthetic oligonucleotide
cccaattatgaatctg

SEQ ID NO: 1956 - DNA, 16 bp, Artificial sequence
  Synthetic oligonucleotide
atagtaattgctatag

SEQ ID NO: 1957 - DNA, 16 bp, Artificial sequence
  Synthetic oligonucleotide
gtcatttagaatacgc

SEQ ID NO: 1958 - DNA, 16 bp, Artificial sequence
  Synthetic oligonucleotide
atgttcatggctttgc

SEQ ID NO: 1959 - DNA, 16 bp, Artificial sequence
  Synthetic oligonucleotide
ctccaagtaggagtag

SEQ ID NO: 1960 - DNA, 16 bp, Artificial sequence
  Synthetic oligonucleotide
ctccagtaatgagaac

SEQ ID NO: 1961 - DNA, 16 bp, Artificial sequence
  Synthetic oligonucleotide
tcccacagaaccaata

SEQ ID NO: 1962 - DNA, 16 bp, Artificial sequence
  Synthetic oligonucleotide
agttttcggcactcag

SEQ ID NO: 1963 - DNA, 16 bp, Artificial sequence
  Synthetic oligonucleotide
gagcgatagatctctt

SEQ ID NO: 1964 - DNA, 16 bp, Artificial sequence
  Synthetic oligonucleotide
cacgattgttacatca

SEQ ID NO: 1965 - DNA, 16 bp, Artificial sequence
  Synthetic oligonucleotide
ggctggatatactgtc

SEQ ID NO: 1966 - DNA, 16 bp, Artificial sequence
  Synthetic oligonucleotide
aatgtcttggtaatct

SEQ ID NO: 1967 - DNA, 16 bp, Artificial sequence
  Synthetic oligonucleotide
agtgcttttgtgatcc

SEQ ID NO: 1968 - DNA, 16 bp, Artificial sequence
  Synthetic oligonucleotide
cactgtgacgatgtgg

SEQ ID NO: 1969 - DNA, 16 bp, Artificial sequence
  Synthetic oligonucleotide
ctggaacaatatggga

SEQ ID NO: 1970 - DNA, 16 bp, Artificial sequence
  Synthetic oligonucleotide
ccaaggcctgaagttc

SEQ ID NO: 1971 - DNA, 16 bp, Artificial sequence
  Synthetic oligonucleotide
tacaggccataatctt

SEQ ID NO: 1972 - DNA, 16 bp, Artificial sequence
  Synthetic oligonucleotide
tcagacttcttacgac

SEQ ID NO: 1973 - DNA, 16 bp, Artificial sequence
  Synthetic oligonucleotide
ttgatatacgatggaa

SEQ ID NO: 1974 - DNA, 16 bp, Artificial sequence
  Synthetic oligonucleotide
tctgcatacgatttaa

SEQ ID NO: 1975 - DNA, 16 bp, Artificial sequence
  Synthetic oligonucleotide
ctggctggagcttatt

SEQ ID NO: 1976 - DNA, 16 bp, Artificial sequence
  Synthetic oligonucleotide
attgattcgaaactat

SEQ ID NO: 1977 - DNA, 16 bp, Artificial sequence
  Synthetic oligonucleotide
tgactgctgctagtgc

SEQ ID NO: 1978 - DNA, 16 bp, Artificial sequence
  Synthetic oligonucleotide
gtagcttttgtccacc

SEQ ID NO: 1979 - DNA, 16 bp, Artificial sequence
  Synthetic oligonucleotide
agtcttaaaccttccc

SEQ ID NO: 1980 - DNA, 16 bp, Artificial sequence
  Synthetic oligonucleotide
ggctacagattggaat

SEQ ID NO: 1981 - DNA, 16 bp, Artificial sequence
  Synthetic oligonucleotide
tagctgtgcactcatt

SEQ ID NO: 1982 - DNA, 16 bp, Artificial sequence
  Synthetic oligonucleotide
caggttgagataaagc

SEQ ID NO: 1983 - DNA, 16 bp, Artificial sequence
  Synthetic oligonucleotide
gagttgcaccgttttg

SEQ ID NO: 1984 - DNA, 16 bp, Artificial sequence
  Synthetic oligonucleotide
acttttggtggacttc

SEQ ID NO: 1985 - DNA, 16 bp, Artificial sequence
  Synthetic oligonucleotide
ggtcacctttcataat

SEQ ID NO: 1986 - DNA, 16 bp, Artificial sequence
  Synthetic oligonucleotide
tctctgggaccaagga

SEQ ID NO: 1987 - DNA, 16 bp, Artificial sequence
  Synthetic oligonucleotide
tagccagtacagttcc

SEQ ID NO: 1988 - DNA, 16 bp, Artificial sequence
  Synthetic oligonucleotide
gagtcggattattttt

SEQ ID NO: 1989 - DNA, 16 bp, Artificial sequence
  Synthetic oligonucleotide
caaaacaagattagtc

SEQ ID NO: 1990 - DNA, 16 bp, Artificial sequence
  Synthetic oligonucleotide
tacatatcttactctg

SEQ ID NO: 1991 - DNA, 16 bp, Artificial sequence
  Synthetic oligonucleotide
tcataaaaatcgctgc

SEQ ID NO: 1992 - DNA, 16 bp, Artificial sequence
  Synthetic oligonucleotide
gtttatcatgtgccac

SEQ ID NO: 1993 - DNA, 16 bp, Artificial sequence
  Synthetic oligonucleotide
gtaaattcttgctatc

SEQ ID NO: 1994 - DNA, 16 bp, Artificial sequence
  Synthetic oligonucleotide
gttacattacagcctt

SEQ ID NO: 1995 - DNA, 16 bp, Artificial sequence
  Synthetic oligonucleotide
agcttaaactccaatg

SEQ ID NO: 1996 - DNA, 16 bp, Artificial sequence
  Synthetic oligonucleotide
tcaaagtcagtatccc

SEQ ID NO: 1997 - DNA, 16 bp, Artificial sequence
  Synthetic oligonucleotide
gatacctgaaaagccc

SEQ ID NO: 1998 - DNA, 16 bp, Artificial sequence
  Synthetic oligonucleotide
taccaaacttgcccat

SEQ ID NO: 1999 - DNA, 16 bp, Artificial sequence
  Synthetic oligonucleotide
atgtaataggcagtaa

SEQ ID NO: 2000 - DNA, 16 bp, Artificial sequence
  Synthetic oligonucleotide
acaattaacattcggc

SEQ ID NO: 2001 - DNA, 16 bp, Artificial sequence
  Synthetic oligonucleotide
taggaagtgatccata

SEQ ID NO: 2002 - DNA, 16 bp, Artificial sequence
  Synthetic oligonucleotide
ataactacatgacctg

SEQ ID NO: 2003 - DNA, 16 bp, Artificial sequence
  Synthetic oligonucleotide
ccaaagatgagagtct

SEQ ID NO: 2004 - DNA, 16 bp, Artificial sequence
  Synthetic oligonucleotide
caaagatctggccagt

SEQ ID NO: 2005 - DNA, 16 bp, Artificial sequence
  Synthetic oligonucleotide
caaaagtgtcctcgat

SEQ ID NO: 2006 - DNA, 16 bp, Artificial sequence
  Synthetic oligonucleotide
tacactaatattgagg

SEQ ID NO: 2007 - DNA, 16 bp, Artificial sequence
  Synthetic oligonucleotide
tgaacatacattgttg

SEQ ID NO: 2008 - DNA, 16 bp, Artificial sequence
  Synthetic oligonucleotide
gacagttgagtagtgt

SEQ ID NO: 2009 - DNA, 16 bp, Artificial sequence
  Synthetic oligonucleotide
tttattggtatggtaa

SEQ ID NO: 2010 - DNA, 16 bp, Artificial sequence
  Synthetic oligonucleotide
tgtaattggctcttga

SEQ ID NO: 2011 - DNA, 16 bp, Artificial sequence
  Synthetic oligonucleotide
accaaggccatgacat

SEQ ID NO: 2012 - DNA, 16 bp, Artificial sequence
  Synthetic oligonucleotide
tctacaaaactggtat

SEQ ID NO: 2013 - DNA, 16 bp, Artificial sequence
  Synthetic oligonucleotide
aaccaatcctcagctt

SEQ ID NO: 2014 - DNA, 16 bp, Artificial sequence
  Synthetic oligonucleotide
gatcaaatgtatgtgc

SEQ ID NO: 2015 - DNA, 16 bp, Artificial sequence
  Synthetic oligonucleotide
ggcttaattttcgggt

SEQ ID NO: 2016 - DNA, 16 bp, Artificial sequence
  Synthetic oligonucleotide
tttaggattaattccc

SEQ ID NO: 2017 - DNA, 16 bp, Artificial sequence
  Synthetic oligonucleotide
gacaatacaggataga

SEQ ID NO: 2018 - DNA, 16 bp, Artificial sequence
  Synthetic oligonucleotide
cttaggaaagctcatg

SEQ ID NO: 2019 - DNA, 16 bp, Artificial sequence
  Synthetic oligonucleotide
ccttactaaggaaatt

SEQ ID NO: 2020 - DNA, 16 bp, Artificial sequence
  Synthetic oligonucleotide
tgtgattgagttctcc

SEQ ID NO: 2021 - DNA, 16 bp, Artificial sequence
  Synthetic oligonucleotide
tcataaacataggctt

SEQ ID NO: 2022 - DNA, 16 bp, Artificial sequence
  Synthetic oligonucleotide
ctctaaatacccttgg

SEQ ID NO: 2023 - DNA, 16 bp, Artificial sequence
  Synthetic oligonucleotide
gattaatcatgggaca

SEQ ID NO: 2024 - DNA, 16 bp, Artificial sequence
  Synthetic oligonucleotide
tatcaaaatggtggcg

SEQ ID NO: 2025 - DNA, 16 bp, Artificial sequence
  Synthetic oligonucleotide
ttagtatttgggtgtt

SEQ ID NO: 2026 - DNA, 16 bp, Artificial sequence
  Synthetic oligonucleotide
tcccaaccaaacttcc

SEQ ID NO: 2027 - DNA, 16 bp, Artificial sequence
  Synthetic oligonucleotide
gcatattcatttggcc

SEQ ID NO: 2028 - DNA, 16 bp, Artificial sequence
  Synthetic oligonucleotide
gtttcaaaaaggccca

SEQ ID NO: 2029 - DNA, 16 bp, Artificial sequence
  Synthetic oligonucleotide
tagtaattgcatctgc

SEQ ID NO: 2030 - DNA, 16 bp, Artificial sequence
  Synthetic oligonucleotide
tggaggaaagcttcaa

SEQ ID NO: 2031 - DNA, 16 bp, Artificial sequence
  Synthetic oligonucleotide
accaagagacaccacc

SEQ ID NO: 2032 - DNA, 16 bp, Artificial sequence
  Synthetic oligonucleotide
cttacgacaggtcatc

SEQ ID NO: 2033 - DNA, 16 bp, Artificial sequence
  Synthetic oligonucleotide
ttagaagtcagcccaa

SEQ ID NO: 2034 - DNA, 16 bp, Artificial sequence
  Synthetic oligonucleotide
ctatagtaattgctat

SEQ ID NO: 2035 - DNA, 16 bp, Artificial sequence
  Synthetic oligonucleotide
ggtcatttagaatacg

SEQ ID NO: 2036 - DNA, 16 bp, Artificial sequence
  Synthetic oligonucleotide
cagttattagaagtca

SEQ ID NO: 2037 - DNA, 16 bp, Artificial sequence
  Synthetic oligonucleotide
gagttatctggtttgc

SEQ ID NO: 2038 - DNA, 16 bp, Artificial sequence
  Synthetic oligonucleotide
tcgatcctatatacat

SEQ ID NO: 2039 - DNA, 16 bp, Artificial sequence
  Synthetic oligonucleotide
gctgaaactgctgatt

SEQ ID NO: 2040 - DNA, 16 bp, Artificial sequence
  Synthetic oligonucleotide
acagttccttttcctg

SEQ ID NO: 2041 - DNA, 16 bp, Artificial sequence
  Synthetic oligonucleotide
tacttaccaatatggg

SEQ ID NO: 2042 - DNA, 16 bp, Artificial sequence
  Synthetic oligonucleotide
taactgagttattctc

SEQ ID NO: 2043 - DNA, 16 bp, Artificial sequence
  Synthetic oligonucleotide
ctaaactagtggtaat

SEQ ID NO: 2044 - DNA, 16 bp, Artificial sequence
  Synthetic oligonucleotide
taggtagctaatgtat

SEQ ID NO: 2045 - DNA, 16 bp, Artificial sequence
  Synthetic oligonucleotide
taattacaacctggtt

SEQ ID NO: 2046 - DNA, 16 bp, Artificial sequence
  Synthetic oligonucleotide
gtaaaggctgggtgag

SEQ ID NO: 2047 - DNA, 16 bp, Artificial sequence
  Synthetic oligonucleotide
tcataccacataccca

SEQ ID NO: 2048 - DNA, 16 bp, Artificial sequence
  Synthetic oligonucleotide
cttagtaccaagacac

SEQ ID NO: 2049 - DNA, 16 bp, Artificial sequence
  Synthetic oligonucleotide
gatgctccataataat

SEQ ID NO: 2050 - DNA, 16 bp, Artificial sequence
  Synthetic oligonucleotide
tgcatcttaagatacc

SEQ ID NO: 2051 - DNA, 16 bp, Artificial sequence
  Synthetic oligonucleotide
agaatagtcttcagca

SEQ ID NO: 2052 - DNA, 16 bp, Artificial sequence
  Synthetic oligonucleotide
ggctaaaatggtcatc

SEQ ID NO: 2053 - DNA, 16 bp, Artificial sequence
  Synthetic oligonucleotide
taagagatgagtaggc

SEQ ID NO: 2054 - DNA, 16 bp, Artificial sequence
  Synthetic oligonucleotide
tctatagctaagtata

SEQ ID NO: 2055 - DNA, 16 bp, Artificial sequence
  Synthetic oligonucleotide
tattcttatgtcatcc

SEQ ID NO: 2056 - DNA, 16 bp, Artificial sequence
  Synthetic oligonucleotide
attggtaagtattcca

SEQ ID NO: 2057 - DNA, 16 bp, Artificial sequence
  Synthetic oligonucleotide
tttaagaggcatgaaa

SEQ ID NO: 2058 - DNA, 16 bp, Artificial sequence
  Synthetic oligonucleotide
tcaagacattctagcc

SEQ ID NO: 2059 - DNA, 16 bp, Artificial sequence
  Synthetic oligonucleotide
ctagatactcaattta

SEQ ID NO: 2060 - DNA, 16 bp, Artificial sequence
  Synthetic oligonucleotide
ggctgtaagagtcagt

SEQ ID NO: 2061 - DNA, 16 bp, Artificial sequence
  Synthetic oligonucleotide
cctaccaagagggttt

SEQ ID NO: 2062 - DNA, 16 bp, Artificial sequence
  Synthetic oligonucleotide
attgttagctaaggga

SEQ ID NO: 2063 - DNA, 16 bp, Artificial sequence
  Synthetic oligonucleotide
gccttgaatagcaagc

SEQ ID NO: 2064 - DNA, 16 bp, Artificial sequence
  Synthetic oligonucleotide
acaggatagagcacat

SEQ ID NO: 2065 - DNA, 16 bp, Artificial sequence
  Synthetic oligonucleotide
acattagcaagctaag

SEQ ID NO: 2066 - DNA, 16 bp, Artificial sequence
  Synthetic oligonucleotide
atccagatctgcccta

SEQ ID NO: 2067 - DNA, 16 bp, Artificial sequence
  Synthetic oligonucleotide
ttgcaagtttatcagt

SEQ ID NO: 2068 - DNA, 16 bp, Artificial sequence
  Synthetic oligonucleotide
gtttcaactaaacatg

SEQ ID NO: 2069 - DNA, 16 bp, Artificial sequence
  Synthetic oligonucleotide
ggaccagggaatttat

SEQ ID NO: 2070 - DNA, 16 bp, Artificial sequence
  Synthetic oligonucleotide
cttttgtccaccttta

SEQ ID NO: 2071 - DNA, 16 bp, Artificial sequence
  Synthetic oligonucleotide
gtcagtagagagcata

SEQ ID NO: 2072 - DNA, 16 bp, Artificial sequence
  Synthetic oligonucleotide
tttcacctcaggtgac

SEQ ID NO: 2073 - DNA, 16 bp, Artificial sequence
  Synthetic oligonucleotide
ctcgcctaaaggagat

SEQ ID NO: 2074 - DNA, 16 bp, Artificial sequence
  Synthetic oligonucleotide
tcctttgtatttcgct

SEQ ID NO: 2075 - DNA, 16 bp, Artificial sequence
  Synthetic oligonucleotide
cctccttatttgttag

SEQ ID NO: 2076 - DNA, 16 bp, Artificial sequence
  Synthetic oligonucleotide
tttcagatcccgttct

SEQ ID NO: 2077 - DNA, 16 bp, Artificial sequence
  Synthetic oligonucleotide
agtgtaagctgagagt

SEQ ID NO: 2078 - DNA, 16 bp, Artificial sequence
  Synthetic oligonucleotide
ccaacgcaacagttta

SEQ ID NO: 2079 - DNA, 16 bp, Artificial sequence
  Synthetic oligonucleotide
agcattcatcagatgt

SEQ ID NO: 2080 - DNA, 16 bp, Artificial sequence
  Synthetic oligonucleotide
ttgcaaaatgtgatgc

SEQ ID NO: 2081 - DNA, 16 bp, Artificial sequence
  Synthetic oligonucleotide
gtgtttacaagtaaga

SEQ ID NO: 2082 - DNA, 16 bp, Artificial sequence
  Synthetic oligonucleotide
agatgggcaaggccac

SEQ ID NO: 2083 - DNA, 16 bp, Artificial sequence
  Synthetic oligonucleotide
ctggagaagagtttac

SEQ ID NO: 2084 - DNA, 16 bp, Artificial sequence
  Synthetic oligonucleotide
agacagactgttgagc

SEQ ID NO: 2085 - DNA, 16 bp, Artificial sequence
  Synthetic oligonucleotide
catagtttatatggat

SEQ ID NO: 2086 - DNA, 16 bp, Artificial sequence
  Synthetic oligonucleotide
tgttatctcaagtcag

SEQ ID NO: 2087 - DNA, 16 bp, Artificial sequence
  Synthetic oligonucleotide
atgttaggacccagtc

SEQ ID NO: 2088 - DNA, 16 bp, Artificial sequence
  Synthetic oligonucleotide
tacactgacaaccctt

SEQ ID NO: 2089 - DNA, 16 bp, Artificial sequence
  Synthetic oligonucleotide
gagaaatctaagaacc

SEQ ID NO: 2090 - DNA, 16 bp, Artificial sequence
  Synthetic oligonucleotide
aatgaatcatgattga

SEQ ID NO: 2091 - DNA, 16 bp, Artificial sequence
  Synthetic oligonucleotide
tgaaatcttgtgtaac

SEQ ID NO: 2092 - DNA, 16 bp, Artificial sequence
  Synthetic oligonucleotide
agtgcttagttcattg

SEQ ID NO: 2093 - DNA, 16 bp, Artificial sequence
  Synthetic oligonucleotide
caatcccaaccaaact

SEQ ID NO: 2094 - DNA, 16 bp, Artificial sequence
  Synthetic oligonucleotide
cttggaaggagactgg

SEQ ID NO: 2095 - DNA, 16 bp, Artificial sequence
  Synthetic oligonucleotide
ccgcccttaagtcatt

SEQ ID NO: 2096 - DNA, 16 bp, Artificial sequence
  Synthetic oligonucleotide
actttcatagggagac

SEQ ID NO: 2097 - DNA, 16 bp, Artificial sequence
  Synthetic oligonucleotide
aaggatttctaggatg

SEQ ID NO: 2098 - DNA, 16 bp, Artificial sequence
  Synthetic oligonucleotide
ttagttggtagcttgc

SEQ ID NO: 2099 - DNA, 16 bp, Artificial sequence
  Synthetic oligonucleotide
tcccacaaaactaacc

SEQ ID NO: 2100 - DNA, 16 bp, Artificial sequence
  Synthetic oligonucleotide
tagaactcccaaccca

SEQ ID NO: 2101 - DNA, 16 bp, Artificial sequence
  Synthetic oligonucleotide
ttacccctggcttttc

SEQ ID NO: 2102 - DNA, 16 bp, Artificial sequence
  Synthetic oligonucleotide
actacttcagttagca

SEQ ID NO: 2103 - DNA, 16 bp, Artificial sequence
  Synthetic oligonucleotide
gacagaccaagtagct

SEQ ID NO: 2104 - DNA, 16 bp, Artificial sequence
  Synthetic oligonucleotide
cttccaagcattccat

SEQ ID NO: 2105 - DNA, 16 bp, Artificial sequence
  Synthetic oligonucleotide
ccgaaaaaagtggagg

SEQ ID NO: 2106 - DNA, 16 bp, Artificial sequence
  Synthetic oligonucleotide
aagactttgagactct

SEQ ID NO: 2107 - DNA, 16 bp, Artificial sequence
  Synthetic oligonucleotide
cactttcactgggtgt

SEQ ID NO: 2108 - DNA, 16 bp, Artificial sequence
  Synthetic oligonucleotide
tccaggttgagataaa

SEQ ID NO: 2109 - DNA, 16 bp, Artificial sequence
  Synthetic oligonucleotide
tcacctttcataatgt

SEQ ID NO: 2110 - DNA, 16 bp, Artificial sequence
  Synthetic oligonucleotide
ttgttaagcagatggc

SEQ ID NO: 2111 - DNA, 16 bp, Artificial sequence
  Synthetic oligonucleotide
ctactttcaaaccttg

SEQ ID NO: 2112 - DNA, 16 bp, Artificial sequence
  Synthetic oligonucleotide
tgctatagtaatcaca

SEQ ID NO: 2113 - DNA, 16 bp, Artificial sequence
  Synthetic oligonucleotide
cctttagttagaatag

SEQ ID NO: 2114 - DNA, 16 bp, Artificial sequence
  Synthetic oligonucleotide
attgtttagctgatag

SEQ ID NO: 2115 - DNA, 16 bp, Artificial sequence
  Synthetic oligonucleotide
tgttaacctgcagcag

SEQ ID NO: 2116 - DNA, 16 bp, Artificial sequence
  Synthetic oligonucleotide
tgattgagttctccac

SEQ ID NO: 2117 - DNA, 16 bp, Artificial sequence
  Synthetic oligonucleotide
acataccactcttctc

SEQ ID NO: 2118 - DNA, 16 bp, Artificial sequence
  Synthetic oligonucleotide
ttagaaactgctcctc

SEQ ID NO: 2119 - DNA, 16 bp, Artificial sequence
  Synthetic oligonucleotide
ttgttagagtgcttag

SEQ ID NO: 2120 - DNA, 16 bp, Artificial sequence
  Synthetic oligonucleotide
cttgacaatggttgcc

SEQ ID NO: 2121 - DNA, 16 bp, Artificial sequence
  Synthetic oligonucleotide
atagatccttttttgg

SEQ ID NO: 2122 - DNA, 16 bp, Artificial sequence
  Synthetic oligonucleotide
acattcttcaggtgtt

SEQ ID NO: 2123 - DNA, 16 bp, Artificial sequence
  Synthetic oligonucleotide
ttgcagttattagaag

SEQ ID NO: 2124 - DNA, 16 bp, Artificial sequence
  Synthetic oligonucleotide
taagatgtccaggcat

SEQ ID NO: 2125 - DNA, 16 bp, Artificial sequence
  Synthetic oligonucleotide
gaagtgtaatgctccc

SEQ ID NO: 2126 - DNA, 16 bp, Artificial sequence
  Synthetic oligonucleotide
tatttcttgcgagaaa

SEQ ID NO: 2127 - DNA, 16 bp, Artificial sequence
  Synthetic oligonucleotide
tttatagactgggtag

SEQ ID NO: 2128 - DNA, 16 bp, Artificial sequence
  Synthetic oligonucleotide
tttcttatgtaatagc

SEQ ID NO: 2129 - DNA, 16 bp, Artificial sequence
  Synthetic oligonucleotide
aaacatctctgggacc

SEQ ID NO: 2130 - DNA, 16 bp, Artificial sequence
  Synthetic oligonucleotide
agtgcatcttaagata

SEQ ID NO: 2131 - DNA, 16 bp, Artificial sequence
  Synthetic oligonucleotide
gaaactcacttcctac

SEQ ID NO: 2132 - DNA, 16 bp, Artificial sequence
  Synthetic oligonucleotide
aatacattagcaagct

SEQ ID NO: 2133 - DNA, 16 bp, Artificial sequence
  Synthetic oligonucleotide
agacatgaggttttga

SEQ ID NO: 2134 - DNA, 16 bp, Artificial sequence
  Synthetic oligonucleotide
gacaatgtgcagctct

SEQ ID NO: 2135 - DNA, 16 bp, Artificial sequence
  Synthetic oligonucleotide
taaagcaggctacttt

SEQ ID NO: 2136 - DNA, 16 bp, Artificial sequence
  Synthetic oligonucleotide
cataagagatgagtag

SEQ ID NO: 2137 - DNA, 16 bp, Artificial sequence
  Synthetic oligonucleotide
gagctagacaattgca

SEQ ID NO: 2138 - DNA, 16 bp, Artificial sequence
  Synthetic oligonucleotide
tagtgaacatacattg

SEQ ID NO: 2139 - DNA, 16 bp, Artificial sequence
  Synthetic oligonucleotide
gctgctatttagggca

SEQ ID NO: 2140 - DNA, 16 bp, Artificial sequence
  Synthetic oligonucleotide
ttctaggtcagtagag

SEQ ID NO: 2141 - DNA, 16 bp, Artificial sequence
  Synthetic oligonucleotide
taaaatatgtccaggt

SEQ ID NO: 2142 - DNA, 16 bp, Artificial sequence
  Synthetic oligonucleotide
agaccaaaaagatggc

SEQ ID NO: 2143 - DNA, 16 bp, Artificial sequence
  Synthetic oligonucleotide
aactctattgattggc

SEQ ID NO: 2144 - DNA, 16 bp, Artificial sequence
  Synthetic oligonucleotide
aattcaccttgactaa

SEQ ID NO: 2145 - DNA, 16 bp, Artificial sequence
  Synthetic oligonucleotide
atcaaatgtatgtgct

SEQ ID NO: 2146 - DNA, 16 bp, Artificial sequence
  Synthetic oligonucleotide
ctacagaggagtttgc

SEQ ID NO: 2147 - DNA, 16 bp, Artificial sequence
  Synthetic oligonucleotide
actccccaaacatgga

SEQ ID NO: 2148 - DNA, 16 bp, Artificial sequence
  Synthetic oligonucleotide
gctgagtggattacat

SEQ ID NO: 2149 - DNA, 16 bp, Artificial sequence
  Synthetic oligonucleotide
gtgctaagtagtaatt

SEQ ID NO: 2150 - DNA, 16 bp, Artificial sequence
  Synthetic oligonucleotide
tttcttattggtaagt

SEQ ID NO: 2151 - DNA, 16 bp, Artificial sequence
  Synthetic oligonucleotide
gagattacccctggct

SEQ ID NO: 2152 - DNA, 16 bp, Artificial sequence
  Synthetic oligonucleotide
actcgggaagtttaga

SEQ ID NO: 2153 - DNA, 16 bp, Artificial sequence
  Synthetic oligonucleotide
gttgatatttccatct

SEQ ID NO: 2154 - DNA, 16 bp, Artificial sequence
  Synthetic oligonucleotide
agcatcaagacattct

SEQ ID NO: 2155 - DNA, 16 bp, Artificial sequence
  Synthetic oligonucleotide
agtagtgtaagctgag

SEQ ID NO: 2156 - DNA, 16 bp, Artificial sequence
  Synthetic oligonucleotide
caggctgtaagagtca

SEQ ID NO: 2157 - DNA, 16 bp, Artificial sequence
  Synthetic oligonucleotide
gccaaactgctactgt

SEQ ID NO: 2158 - DNA, 16 bp, Artificial sequence
  Synthetic oligonucleotide
atatccagtaggtgtg

SEQ ID NO: 2159 - DNA, 16 bp, Artificial sequence
  Synthetic oligonucleotide
caagtttgttcatagt

SEQ ID NO: 2160 - DNA, 16 bp, Artificial sequence
  Synthetic oligonucleotide
tcttaaaccttccctg

SEQ ID NO: 2161 - DNA, 16 bp, Artificial sequence
  Synthetic oligonucleotide
aaagtgtcctcgatcc

SEQ ID NO: 2162 - DNA, 16 bp, Artificial sequence
  Synthetic oligonucleotide
tgagagaacttataca

SEQ ID NO: 2163 - DNA, 16 bp, Artificial sequence
  Synthetic oligonucleotide
tattcccaacgcaaca

SEQ ID NO: 2164 - DNA, 16 bp, Artificial sequence
  Synthetic oligonucleotide
acccgcccttaagtca

SEQ ID NO: 2165 - DNA, 16 bp, Artificial sequence
  Synthetic oligonucleotide
ataggagagtctttca

SEQ ID NO: 2166 - DNA, 16 bp, Artificial sequence
  Synthetic oligonucleotide
gcacatcatgttttgc

SEQ ID NO: 2167 - DNA, 16 bp, Artificial sequence
  Synthetic oligonucleotide
tacaccacactaatga

SEQ ID NO: 2168 - DNA, 16 bp, Artificial sequence
  Synthetic oligonucleotide
ctcagagttcaggcaa

SEQ ID NO: 2169 - DNA, 16 bp, Artificial sequence
  Synthetic oligonucleotide
gacagagcaatttact

SEQ ID NO: 2170 - DNA, 16 bp, Artificial sequence
  Synthetic oligonucleotide
actccgttataagttt

SEQ ID NO: 2171 - DNA, 16 bp, Artificial sequence
  Synthetic oligonucleotide
aaattcataagtagtc

SEQ ID NO: 2172 - DNA, 16 bp, Artificial sequence
  Synthetic oligonucleotide
ccttatgttatctcaa

SEQ ID NO: 2173 - DNA, 16 bp, Artificial sequence
  Synthetic oligonucleotide
ccttaccagaatttac

SEQ ID NO: 2174 - DNA, 16 bp, Artificial sequence
  Synthetic oligonucleotide
ccagagcattcatcag

SEQ ID NO: 2175 - DNA, 16 bp, Artificial sequence
  Synthetic oligonucleotide
gaaaagatgtacactg

SEQ ID NO: 2176 - DNA, 16 bp, Artificial sequence
  Synthetic oligonucleotide
ctaacctgacacatat

SEQ ID NO: 2177 - DNA, 16 bp, Artificial sequence
  Synthetic oligonucleotide
tttttaagaggcatga

SEQ ID NO: 2178 - DNA, 16 bp, Artificial sequence
  Synthetic oligonucleotide
aagagctggtaaaggt

SEQ ID NO: 2179 - DNA, 16 bp, Artificial sequence
  Synthetic oligonucleotide
gacttgcctcatttag

SEQ ID NO: 2180 - DNA, 16 bp, Artificial sequence
  Synthetic oligonucleotide
cctatgcaaattcata

SEQ ID NO: 2181 - DNA, 16 bp, Artificial sequence
  Synthetic oligonucleotide
aaggactttcataggg

SEQ ID NO: 2182 - DNA, 16 bp, Artificial sequence
  Synthetic oligonucleotide
cagtaaaattatgcct

SEQ ID NO: 2183 - DNA, 16 bp, Artificial sequence
  Synthetic oligonucleotide
aattttcagatcccgt

SEQ ID NO: 2184 - DNA, 16 bp, Artificial sequence
  Synthetic oligonucleotide
aagacagaccaagtag

SEQ ID NO: 2185 - DNA, 16 bp, Artificial sequence
  Synthetic oligonucleotide
acctctaagttagccc

SEQ ID NO: 2186 - DNA, 16 bp, Artificial sequence
  Synthetic oligonucleotide
caaaagactttgagac

SEQ ID NO: 2187 - DNA, 16 bp, Artificial sequence
  Synthetic oligonucleotide
aatacgctgagagtta

SEQ ID NO: 2188 - DNA, 16 bp, Artificial sequence
  Synthetic oligonucleotide
ttccgaaaaaagtgga

SEQ ID NO: 2189 - DNA, 16 bp, Artificial sequence
  Synthetic oligonucleotide
cgtcaaatagggctgg

SEQ ID NO: 2190 - DNA, 16 bp, Artificial sequence
  Synthetic oligonucleotide
cttcactatattgcat

SEQ ID NO: 2191 - DNA, 16 bp, Artificial sequence
  Synthetic oligonucleotide
cagcatcaagacattc

SEQ ID NO: 2192 - DNA, 16 bp, Artificial sequence
  Synthetic oligonucleotide
ttttatagactgggta

SEQ ID NO: 2193 - DNA, 16 bp, Artificial sequence
  Synthetic oligonucleotide
atagttcaaattggat

SEQ ID NO: 2194 - DNA, 16 bp, Artificial sequence
  Synthetic oligonucleotide
tgttttagtatttggg

SEQ ID NO: 2195 - DNA, 16 bp, Artificial sequence
  Synthetic oligonucleotide
caccatgacagcttca

SEQ ID NO: 2196 - DNA, 16 bp, Artificial sequence
  Synthetic oligonucleotide
cttctgtaggttttgc

SEQ ID NO: 2197 - DNA, 16 bp, Artificial sequence
  Synthetic oligonucleotide
tagttatcttctcact

SEQ ID NO: 2198 - DNA, 16 bp, Artificial sequence
  Synthetic oligonucleotide
atgcaaaagcattcta

SEQ ID NO: 2199 - DNA, 16 bp, Artificial sequence
  Synthetic oligonucleotide
tcttgacaatggttgc

SEQ ID NO: 2200 - DNA, 16 bp, Artificial sequence
  Synthetic oligonucleotide
taactctattgattgg

SEQ ID NO: 2201 - DNA, 16 bp, Artificial sequence
  Synthetic oligonucleotide
gacaacagagttctgt

SEQ ID NO: 2202 - DNA, 16 bp, Artificial sequence
  Synthetic oligonucleotide
gaaattcaccttgact

SEQ ID NO: 2203 - DNA, 16 bp, Artificial sequence
  Synthetic oligonucleotide
tggaatgctacttgaa

SEQ ID NO: 2204 - DNA, 16 bp, Artificial sequence
  Synthetic oligonucleotide
gagtagtgtaagctga

SEQ ID NO: 2205 - DNA, 16 bp, Artificial sequence
  Synthetic oligonucleotide
acggtgatcaaatgta

SEQ ID NO: 2206 - DNA, 16 bp, Artificial sequence
  Synthetic oligonucleotide
aaaaccgtcaaatagg

SEQ ID NO: 2207 - DNA, 16 bp, Artificial sequence
  Synthetic oligonucleotide
tattctccaactcagg

SEQ ID NO: 2208 - DNA, 16 bp, Artificial sequence
  Synthetic oligonucleotide
ctccttatgttatctc

SEQ ID NO: 2209 - DNA, 16 bp, Artificial sequence
  Synthetic oligonucleotide
tgttatcagaaactta

SEQ ID NO: 2210 - DNA, 16 bp, Artificial sequence
  Synthetic oligonucleotide
gctgtaattaggaaga

SEQ ID NO: 2211 - DNA, 16 bp, Artificial sequence
  Synthetic oligonucleotide
agaaccaggactctcc

SEQ ID NO: 2212 - DNA, 16 bp, Artificial sequence
  Synthetic oligonucleotide
caaattcataagtagt

SEQ ID NO: 2213 - DNA, 16 bp, Artificial sequence
  Synthetic oligonucleotide
aagaggctagggaaat

SEQ ID NO: 2214 - DNA, 16 bp, Artificial sequence
  Synthetic oligonucleotide
gacaactgatgtccag

SEQ ID NO: 2215 - DNA, 16 bp, Artificial sequence
  Synthetic oligonucleotide
gacagtaaaattatgc

SEQ ID NO: 2216 - DNA, 16 bp, Artificial sequence
  Synthetic oligonucleotide
ttgtaccctgttctca

SEQ ID NO: 2217 - DNA, 16 bp, Artificial sequence
  Synthetic oligonucleotide
aattaagatgtccagg

SEQ ID NO: 2218 - DNA, 16 bp, Artificial sequence
  Synthetic oligonucleotide
ttctacaccacactaa

SEQ ID NO: 2219 - DNA, 16 bp, Artificial sequence
  Synthetic oligonucleotide
agtttttaagaggcat

SEQ ID NO: 2220 - DNA, 16 bp, Artificial sequence
  Synthetic oligonucleotide
tcacaaagtccctgac

SEQ ID NO: 2221 - DNA, 16 bp, Artificial sequence
  Synthetic oligonucleotide
catgaagattagttaa

SEQ ID NO: 2222 - DNA, 16 bp, Artificial sequence
  Synthetic oligonucleotide
tctcagagttcaggca

SEQ ID NO: 2223 - DNA, 16 bp, Artificial sequence
  Synthetic oligonucleotide
gtttctaggtcagtag

SEQ ID NO: 2224 - DNA, 16 bp, Artificial sequence
  Synthetic oligonucleotide
agtgctaagtagtaat

SEQ ID NO: 2225 - DNA, 16 bp, Artificial sequence
  Synthetic oligonucleotide
taaaccctggagcagc

SEQ ID NO: 2226 - DNA, 16 bp, Artificial sequence
  Synthetic oligonucleotide
agccaaactgctactg

SEQ ID NO: 2227 - DNA, 16 bp, Artificial sequence
  Synthetic oligonucleotide
tgtgaagagctggtaa

SEQ ID NO: 2228 - DNA, 16 bp, Artificial sequence
  Synthetic oligonucleotide
agaaggactttcatag

SEQ ID NO: 2229 - DNA, 16 bp, Artificial sequence
  Synthetic oligonucleotide
aagtttgttagagtgc

SEQ ID NO: 2230 - DNA, 16 bp, Artificial sequence
  Synthetic oligonucleotide
ccagtaaaaaattggt

SEQ ID NO: 2231 - DNA, 16 bp, Artificial sequence
  Synthetic oligonucleotide
attatttcttgcgaga

SEQ ID NO: 2232 - DNA, 16 bp, Artificial sequence
  Synthetic oligonucleotide
aaaagtgtcctcgatc

SEQ ID NO: 2233 - DNA, 16 bp, Artificial sequence
  Synthetic oligonucleotide
aagaataggagagtct

SEQ ID NO: 2234 - DNA, 16 bp, Artificial sequence
  Synthetic oligonucleotide
gacttttgtttgtagc

SEQ ID NO: 2235 - DNA, 16 bp, Artificial sequence
  Synthetic oligonucleotide
tacattcttcaggtgt

SEQ ID NO: 2236 - DNA, 16 bp, Artificial sequence
  Synthetic oligonucleotide
tgagctagacaattgc

SEQ ID NO: 2237 - DNA, 16 bp, Artificial sequence
  Synthetic oligonucleotide
agagacatgaggtttt

SEQ ID NO: 2238 - DNA, 16 bp, Artificial sequence
  Synthetic oligonucleotide
attgcagttattagaa

SEQ ID NO: 2239 - DNA, 16 bp, Artificial sequence
  Synthetic oligonucleotide
ccttcatctaactaac

SEQ ID NO: 2240 - DNA, 16 bp, Artificial sequence
  Synthetic oligonucleotide
ctcaggctgtaagagt

SEQ ID NO: 2241 - DNA, 16 bp, Artificial sequence
  Synthetic oligonucleotide
accgtattcccaacgc

SEQ ID NO: 2242 - DNA, 16 bp, Artificial sequence
  Synthetic oligonucleotide
aactccgttataagtt

SEQ ID NO: 2243 - DNA, 16 bp, Artificial sequence
  Synthetic oligonucleotide
cccctaagttattatc

SEQ ID NO: 2244 - DNA, 16 bp, Artificial sequence
  Synthetic oligonucleotide
tgtgagaggatagtga

SEQ ID NO: 2245 - DNA, 16 bp, Artificial sequence
  Synthetic oligonucleotide
aactgaaacgatcctc

SEQ ID NO: 2246 - DNA, 16 bp, Artificial sequence
  Synthetic oligonucleotide
ggcagttgaagttgat

SEQ ID NO: 2247 - DNA, 16 bp, Artificial sequence
  Synthetic oligonucleotide
gtgggataaactgttc

SEQ ID NO: 2248 - DNA, 16 bp, Artificial sequence
  Synthetic oligonucleotide
tagctattgtctttga

SEQ ID NO: 2249 - DNA, 16 bp, Artificial sequence
  Synthetic oligonucleotide
tacctctaagttagcc

SEQ ID NO: 2250 - DNA, 16 bp, Artificial sequence
  Synthetic oligonucleotide
gtgattgagttctcca

SEQ ID NO: 2251 - DNA, 16 bp, Artificial sequence
  Synthetic oligonucleotide
caagacagaccaagta

SEQ ID NO: 2252 - DNA, 16 bp, Artificial sequence
  Synthetic oligonucleotide
agctgagtggattaca

SEQ ID NO: 2253 - DNA, 16 bp, Artificial sequence
  Synthetic oligonucleotide
ataggacatggagaca

SEQ ID NO: 2254 - DNA, 16 bp, Artificial sequence
  Synthetic oligonucleotide
taccagagcattcatc

SEQ ID NO: 2255 - DNA, 16 bp, Artificial sequence
  Synthetic oligonucleotide
ttgagagaacttatac

SEQ ID NO: 2256 - DNA, 16 bp, Artificial sequence
  Synthetic oligonucleotide
gagtgcatcttaagat

SEQ ID NO: 2257 - DNA, 16 bp, Artificial sequence
  Synthetic oligonucleotide
gccttaccagaattta

SEQ ID NO: 2258 - DNA, 16 bp, Artificial sequence
  Synthetic oligonucleotide
aatcctatgcaaattc

SEQ ID NO: 2259 - DNA, 16 bp, Artificial sequence
  Synthetic oligonucleotide
ctaaacatctctggga

SEQ ID NO: 2260 - DNA, 16 bp, Artificial sequence
  Synthetic oligonucleotide
cgaatttcttcaaaga

SEQ ID NO: 2261 - DNA, 16 bp, Artificial sequence
  Synthetic oligonucleotide
aaagccctattcttcg

SEQ ID NO: 2262 - DNA, 16 bp, Artificial sequence
  Synthetic oligonucleotide
tgtacagtaggcagtt

SEQ ID NO: 2263 - DNA, 16 bp, Artificial sequence
  Synthetic oligonucleotide
caagtgacagcattga

SEQ ID NO: 2264 - DNA, 16 bp, Artificial sequence
  Synthetic oligonucleotide
atgagattacccctgg

SEQ ID NO: 2265 - DNA, 16 bp, Artificial sequence
  Synthetic oligonucleotide
aacactaatctcagta

SEQ ID NO: 2266 - DNA, 16 bp, Artificial sequence
  Synthetic oligonucleotide
taatacattagcaagc

SEQ ID NO: 2267 - DNA, 16 bp, Artificial sequence
  Synthetic oligonucleotide
ctacctctaagttagc

SEQ ID NO: 2268 - DNA, 16 bp, Artificial sequence
  Synthetic oligonucleotide
gaagaggctagggaaa

SEQ ID NO: 2269 - DNA, 16 bp, Artificial sequence
  Synthetic oligonucleotide
tatacctgttgcctag

SEQ ID NO: 2270 - DNA, 16 bp, Artificial sequence
  Synthetic oligonucleotide
catatggtgtacactg

SEQ ID NO: 2271 - DNA, 16 bp, Artificial sequence
  Synthetic oligonucleotide
gtcaaaaaccgtcaaa

SEQ ID NO: 2272 - DNA, 16 bp, Artificial sequence
  Synthetic oligonucleotide
aatatcccacagaacc

SEQ ID NO: 2273 - DNA, 16 bp, Artificial sequence
  Synthetic oligonucleotide
ataactctattgattg

SEQ ID NO: 2274 - DNA, 16 bp, Artificial sequence
  Synthetic oligonucleotide
tgccaagctttgtgtc

SEQ ID NO: 2275 - DNA, 16 bp, Artificial sequence
  Synthetic oligonucleotide
ccgaattatttcttgc

SEQ ID NO: 2276 - DNA, 16 bp, Artificial sequence
  Synthetic oligonucleotide
aaagttcattcgaatt

SEQ ID NO: 2277 - DNA, 16 bp, Artificial sequence
  Synthetic oligonucleotide
accaatgcagtttgta

SEQ ID NO: 2278 - DNA, 16 bp, Artificial sequence
  Synthetic oligonucleotide
taaagtgctaagtagt

SEQ ID NO: 2279 - DNA, 16 bp, Artificial sequence
  Synthetic oligonucleotide
gtttttctcttgacaa

SEQ ID NO: 2280 - DNA, 16 bp, Artificial sequence
  Synthetic oligonucleotide
gctctattgggccagg

SEQ ID NO: 2281 - DNA, 16 bp, Artificial sequence
  Synthetic oligonucleotide
cgcgagatgatgttgc

SEQ ID NO: 2282 - DNA, 16 bp, Artificial sequence
  Synthetic oligonucleotide
tactattctccaactc

SEQ ID NO: 2283 - DNA, 16 bp, Artificial sequence
  Synthetic oligonucleotide
aagtttttaagaggca

SEQ ID NO: 2284 - DNA, 16 bp, Artificial sequence
  Synthetic oligonucleotide
agaaattcaccttgac

SEQ ID NO: 2285 - DNA, 16 bp, Artificial sequence
  Synthetic oligonucleotide
tctttttatagactgg

SEQ ID NO: 2286 - DNA, 16 bp, Artificial sequence
  Synthetic oligonucleotide
gacatagacatgtgtt

SEQ ID NO: 2287 - DNA, 16 bp, Artificial sequence
  Synthetic oligonucleotide
tctaaacatctctggg

SEQ ID NO: 2288 - DNA, 16 bp, Artificial sequence
  Synthetic oligonucleotide
aacctatgtgtgcacc

SEQ ID NO: 2289 - DNA, 16 bp, Artificial sequence
  Synthetic oligonucleotide
taacggtgatcaaatg

SEQ ID NO: 2290 - DNA, 16 bp, Artificial sequence
  Synthetic oligonucleotide
tttgagagaacttata

SEQ ID NO: 2291 - DNA, 16 bp, Artificial sequence
  Synthetic oligonucleotide
agtatgtgaactccgt

SEQ ID NO: 2292 - DNA, 16 bp, Artificial sequence
  Synthetic oligonucleotide
ttaccagagcattcat

SEQ ID NO: 2293 - DNA, 16 bp, Artificial sequence
  Synthetic oligonucleotide
tgagtagtgtaagctg

SEQ ID NO: 2294 - DNA, 16 bp, Artificial sequence
  Synthetic oligonucleotide
tgggatagtggaggaa

SEQ ID NO: 2295 - DNA, 16 bp, Artificial sequence
  Synthetic oligonucleotide
tatagttatcttctca

SEQ ID NO: 2296 - DNA, 16 bp, Artificial sequence
  Synthetic oligonucleotide
ataatacattagcaag

SEQ ID NO: 2297 - DNA, 16 bp, Artificial sequence
  Synthetic oligonucleotide
ggctaaaccctggagc

SEQ ID NO: 2298 - DNA, 16 bp, Artificial sequence
  Synthetic oligonucleotide
tattgtagggattgaa

SEQ ID NO: 2299 - DNA, 16 bp, Artificial sequence
  Synthetic oligonucleotide
ctgttgcaagttcttc

SEQ ID NO: 2300 - DNA, 16 bp, Artificial sequence
  Synthetic oligonucleotide
tttactcacttctggt

SEQ ID NO: 2301 - DNA, 16 bp, Artificial sequence
  Synthetic oligonucleotide
cacatagctaactcag

SEQ ID NO: 2302 - DNA, 16 bp, Artificial sequence
  Synthetic oligonucleotide
gaaccgtattcccaac

SEQ ID NO: 2303 - DNA, 16 bp, Artificial sequence
  Synthetic oligonucleotide
aggcagttgaagttga

SEQ ID NO: 2304 - DNA, 16 bp, Artificial sequence
  Synthetic oligonucleotide
ttaatgccaccctacc

SEQ ID NO: 2305 - DNA, 16 bp, Artificial sequence
  Synthetic oligonucleotide
gattgcacaaaccaca

SEQ ID NO: 2306 - DNA, 16 bp, Artificial sequence
  Synthetic oligonucleotide
ctaggagatataacat

SEQ ID NO: 2307 - DNA, 16 bp, Artificial sequence
  Synthetic oligonucleotide
ctgaaaagccctattc

SEQ ID NO: 2308 - DNA, 16 bp, Artificial sequence
  Synthetic oligonucleotide
aatttgtgaacctgca

SEQ ID NO: 2309 - DNA, 16 bp, Artificial sequence
  Synthetic oligonucleotide
acattgcagttattag

SEQ ID NO: 2310 - DNA, 16 bp, Artificial sequence
  Synthetic oligonucleotide
gcttagtgtagaattg

SEQ ID NO: 2311 - DNA, 16 bp, Artificial sequence
  Synthetic oligonucleotide
caatgagattacccct

SEQ ID NO: 2312 - DNA, 16 bp, Artificial sequence
  Synthetic oligonucleotide
gatgattctgactcat

SEQ ID NO: 2313 - DNA, 16 bp, Artificial sequence
  Synthetic oligonucleotide
tcattaggaaaagtgt

SEQ ID NO: 2314 - DNA, 16 bp, Artificial sequence
  Synthetic oligonucleotide
aaaggtgggataaact

SEQ ID NO: 2315 - DNA, 16 bp, Artificial sequence
  Synthetic oligonucleotide
gccaacactaatctca

SEQ ID NO: 2316 - DNA, 16 bp, Artificial sequence
  Synthetic oligonucleotide
acagcatcaagacatt

SEQ ID NO: 2317 - DNA, 16 bp, Artificial sequence
  Synthetic oligonucleotide
tgaactgaaacgatcc

SEQ ID NO: 2318 - DNA, 16 bp, Artificial sequence
  Synthetic oligonucleotide
acaagtgacagcattg

SEQ ID NO: 2319 - DNA, 16 bp, Artificial sequence
  Synthetic oligonucleotide
cagagacatgaggttt

SEQ ID NO: 2320 - DNA, 16 bp, Artificial sequence
  Synthetic oligonucleotide
tatgtgaagagctggt

SEQ ID NO: 2321 - DNA, 16 bp, Artificial sequence
  Synthetic oligonucleotide
atcccctaagttatta

SEQ ID NO: 2322 - DNA, 16 bp, Artificial sequence
  Synthetic oligonucleotide
ggattgcagaagagta

SEQ ID NO: 2323 - DNA, 16 bp, Artificial sequence
  Synthetic oligonucleotide
tgacaacagagttctg

SEQ ID NO: 2324 - DNA, 16 bp, Artificial sequence
  Synthetic oligonucleotide
taaactaaagtacttg

SEQ ID NO: 2325 - DNA, 16 bp, Artificial sequence
  Synthetic oligonucleotide
tggccttaccagaatt

SEQ ID NO: 2326 - DNA, 16 bp, Artificial sequence
  Synthetic oligonucleotide
gacatgaagattagtt

SEQ ID NO: 2327 - DNA, 16 bp, Artificial sequence
  Synthetic oligonucleotide
ctgtgagaggatagtg

SEQ ID NO: 2328 - DNA, 16 bp, Artificial sequence
  Synthetic oligonucleotide
attctgtggcatggct

SEQ ID NO: 2329 - DNA, 16 bp, Artificial sequence
  Synthetic oligonucleotide
ccatgcaaaagcattc

SEQ ID NO: 2330 - DNA, 16 bp, Artificial sequence
  Synthetic oligonucleotide
aatcgctgcttagttc

SEQ ID NO: 2331 - DNA, 16 bp, Artificial sequence
  Synthetic oligonucleotide
cagttttcctcatgat

SEQ ID NO: 2332 - DNA, 16 bp, Artificial sequence
  Synthetic oligonucleotide
atgtgattgagttctc

SEQ ID NO: 2333 - DNA, 16 bp, Artificial sequence
  Synthetic oligonucleotide
ctatctccctatttgt

SEQ ID NO: 2334 - DNA, 16 bp, Artificial sequence
  Synthetic oligonucleotide
gatccatattccctga

SEQ ID NO: 2335 - DNA, 16 bp, Artificial sequence
  Synthetic oligonucleotide
ctgagctagacaattg

SEQ ID NO: 2336 - DNA, 16 bp, Artificial sequence
  Synthetic oligonucleotide
tgtatgaggtctctca

SEQ ID NO: 2337 - DNA, 16 bp, Artificial sequence
  Synthetic oligonucleotide
ccaaacttgcccataa

SEQ ID NO: 2338 - DNA, 16 bp, Artificial sequence
  Synthetic oligonucleotide
agagccaaactgctac

SEQ ID NO: 2339 - DNA, 16 bp, Artificial sequence
  Synthetic oligonucleotide
tagaacacttgcctca

SEQ ID NO: 2340 - DNA, 16 bp, Artificial sequence
  Synthetic oligonucleotide
gagttctacaccacac

SEQ ID NO: 2341 - DNA, 16 bp, Artificial sequence
  Synthetic oligonucleotide
ctacttcactatattg

SEQ ID NO: 2342 - DNA, 16 bp, Artificial sequence
  Synthetic oligonucleotide
gctgtacagtaggcag

SEQ ID NO: 2343 - DNA, 16 bp, Artificial sequence
  Synthetic oligonucleotide
gattaattcccttcca

SEQ ID NO: 2344 - DNA, 16 bp, Artificial sequence
  Synthetic oligonucleotide
ctggaaggaggattca

SEQ ID NO: 2345 - DNA, 16 bp, Artificial sequence
  Synthetic oligonucleotide
gtaacggtgatcaaat

SEQ ID NO: 2346 - DNA, 16 bp, Artificial sequence
  Synthetic oligonucleotide
ttgagtagtgtaagct

SEQ ID NO: 2347 - DNA, 16 bp, Artificial sequence
  Synthetic oligonucleotide
acatatgtgaagagct

SEQ ID NO: 2348 - DNA, 16 bp, Artificial sequence
  Synthetic oligonucleotide
cagaagtttttaagag

SEQ ID NO: 2349 - DNA, 16 bp, Artificial sequence
  Synthetic oligonucleotide
gaacctatgtgtgcac

SEQ ID NO: 2350 - DNA, 16 bp, Artificial sequence
  Synthetic oligonucleotide
cttgatgattctgact

SEQ ID NO: 2351 - DNA, 16 bp, Artificial sequence
  Synthetic oligonucleotide
tagtggacttcattag

SEQ ID NO: 2352 - DNA, 16 bp, Artificial sequence
  Synthetic oligonucleotide
ctataatacattagca

SEQ ID NO: 2353 - DNA, 16 bp, Artificial sequence
  Synthetic oligonucleotide
cccgaattatttcttg

SEQ ID NO: 2354 - DNA, 16 bp, Artificial sequence
  Synthetic oligonucleotide
ctctttttatagactg

SEQ ID NO: 2355 - DNA, 16 bp, Artificial sequence
  Synthetic oligonucleotide
gtaaactaaagtactt

SEQ ID NO: 2356 - DNA, 16 bp, Artificial sequence
  Synthetic oligonucleotide
ataaggccgattcatg

SEQ ID NO: 2357 - DNA, 16 bp, Artificial sequence
  Synthetic oligonucleotide
atcagttttcctcatg

SEQ ID NO: 2358 - DNA, 16 bp, Artificial sequence
  Synthetic oligonucleotide
ctaaattattgcctga

SEQ ID NO: 2359 - DNA, 16 bp, Artificial sequence
  Synthetic oligonucleotide
gaagaaacctgtacaa

SEQ ID NO: 2360 - DNA, 16 bp, Artificial sequence
  Synthetic oligonucleotide
attaactacttcacta

SEQ ID NO: 2361 - DNA, 16 bp, Artificial sequence
  Synthetic oligonucleotide
taagcagaattgtgaa

SEQ ID NO: 2362 - DNA, 16 bp, Artificial sequence
  Synthetic oligonucleotide
ccaatatatactgaca

SEQ ID NO: 2363 - DNA, 16 bp, Artificial sequence
  Synthetic oligonucleotide
gtctacctctaagtta

SEQ ID NO: 2364 - DNA, 16 bp, Artificial sequence
  Synthetic oligonucleotide
cttgacaatggttgat

SEQ ID NO: 2365 - DNA, 16 bp, Artificial sequence
  Synthetic oligonucleotide
aatatatacctgttgc

SEQ ID NO: 2366 - DNA, 16 bp, Artificial sequence
  Synthetic oligonucleotide
ttagtatagttatctt

SEQ ID NO: 2367 - DNA, 16 bp, Artificial sequence
  Synthetic oligonucleotide
tatgtgattgagttct

SEQ ID NO: 2368 - DNA, 16 bp, Artificial sequence
  Synthetic oligonucleotide
ctcgcgagatgatgtt

SEQ ID NO: 2369 - DNA, 16 bp, Artificial sequence
  Synthetic oligonucleotide
taggcagtaaagtgct

SEQ ID NO: 2370 - DNA, 16 bp, Artificial sequence
  Synthetic oligonucleotide
tgatacaccaatgcag

SEQ ID NO: 2371 - DNA, 16 bp, Artificial sequence
  Synthetic oligonucleotide
aactgagctagacaat

SEQ ID NO: 2372 - DNA, 16 bp, Artificial sequence
  Synthetic oligonucleotide
tgtaccaaacttgccc

SEQ ID NO: 2373 - DNA, 16 bp, Artificial sequence
  Synthetic oligonucleotide
atgccaagctttgtgt

SEQ ID NO: 2374 - DNA, 16 bp, Artificial sequence
  Synthetic oligonucleotide
gttggaagatgtatac

SEQ ID NO: 2375 - DNA, 16 bp, Artificial sequence
  Synthetic oligonucleotide
gctgagagttctacac

SEQ ID NO: 2376 - DNA, 16 bp, Artificial sequence
  Synthetic oligonucleotide
taaaggtgggataaac

SEQ ID NO: 2377 - DNA, 16 bp, Artificial sequence
  Synthetic oligonucleotide
aattcactatctccct

SEQ ID NO: 2378 - DNA, 16 bp, Artificial sequence
  Synthetic oligonucleotide
ttgttgatattctgtg

SEQ ID NO: 2379 - DNA, 16 bp, Artificial sequence
  Synthetic oligonucleotide
tgaaccgtattcccaa

SEQ ID NO: 2380 - DNA, 16 bp, Artificial sequence
  Synthetic oligonucleotide
ttggttggaggctgta

SEQ ID NO: 2381 - DNA, 16 bp, Artificial sequence
  Synthetic oligonucleotide
gctgcattaatgccac

SEQ ID NO: 2382 - DNA, 16 bp, Artificial sequence
  Synthetic oligonucleotide
tgcaatgagattaccc

SEQ ID NO: 2383 - DNA, 16 bp, Artificial sequence
  Synthetic oligonucleotide
cagaaattcaccttga

SEQ ID NO: 2384 - DNA, 16 bp, Artificial sequence
  Synthetic oligonucleotide
tctaggagatataaca

SEQ ID NO: 2385 - DNA, 16 bp, Artificial sequence
  Synthetic oligonucleotide
gagaattgtttagttc

SEQ ID NO: 2386 - DNA, 16 bp, Artificial sequence
  Synthetic oligonucleotide
ccagattgcacaaacc

SEQ ID NO: 2387 - DNA, 16 bp, Artificial sequence
  Synthetic oligonucleotide
tgccaacactaatctc

SEQ ID NO: 2388 - DNA, 16 bp, Artificial sequence
  Synthetic oligonucleotide
tggaagattaatcata

SEQ ID NO: 2389 - DNA, 16 bp, Artificial sequence
  Synthetic oligonucleotide
tccatgcaaaagcatt

SEQ ID NO: 2390 - DNA, 16 bp, Artificial sequence
  Synthetic oligonucleotide
aagttaccagagcatt

SEQ ID NO: 2391 - DNA, 16 bp, Artificial sequence
  Synthetic oligonucleotide
ggatacctgaaaagcc

SEQ ID NO: 2392 - DNA, 16 bp, Artificial sequence
  Synthetic oligonucleotide
gcagagacatgaggtt

SEQ ID NO: 2393 - DNA, 16 bp, Artificial sequence
  Synthetic oligonucleotide
tttcatggccttacca

SEQ ID NO: 2394 - DNA, 16 bp, Artificial sequence
  Synthetic oligonucleotide
ttggacatgaagatta

SEQ ID NO: 2395 - DNA, 16 bp, Artificial sequence
  Synthetic oligonucleotide
aggcactaaaggtttc

SEQ ID NO: 2396 - DNA, 16 bp, Artificial sequence
  Synthetic oligonucleotide
ggacaaatgcctgaga

SEQ ID NO: 2397 - DNA, 16 bp, Artificial sequence
  Synthetic oligonucleotide
gtttactcacttctgg

SEQ ID NO: 2398 - DNA, 16 bp, Artificial sequence
  Synthetic oligonucleotide
gagttattgtagggat

SEQ ID NO: 2399 - DNA, 16 bp, Artificial sequence
  Synthetic oligonucleotide
ttgtatgaggtctctc

SEQ ID NO: 2400 - DNA, 16 bp, Artificial sequence
  Synthetic oligonucleotide
gaaatttgtgaacctg

SEQ ID NO: 2401 - DNA, 16 bp, Artificial sequence
  Synthetic oligonucleotide
ctacctccaaattccc

SEQ ID NO: 2402 - DNA, 16 bp, Artificial sequence
  Synthetic oligonucleotide
gaagtgatccatattc

SEQ ID NO: 2403 - DNA, 16 bp, Artificial sequence
  Synthetic oligonucleotide
tctttagtcaacagta

SEQ ID NO: 2404 - DNA, 16 bp, Artificial sequence
  Synthetic oligonucleotide
ctgggatactattctc

SEQ ID NO: 2405 - DNA, 16 bp, Artificial sequence
  Synthetic oligonucleotide
taggcttagtgtagaa

SEQ ID NO: 2406 - DNA, 16 bp, Artificial sequence
  Synthetic oligonucleotide
ccaagtaattacttct

SEQ ID NO: 2407 - DNA, 16 bp, Artificial sequence
  Synthetic oligonucleotide
aaggaagaggctaggg

SEQ ID NO: 2408 - DNA, 16 bp, Artificial sequence
  Synthetic oligonucleotide
tcccctcaaatagcct

SEQ ID NO: 2409 - DNA, 16 bp, Artificial sequence
  Synthetic oligonucleotide
ttacagcatcaagaca

SEQ ID NO: 2410 - DNA, 16 bp, Artificial sequence
  Synthetic oligonucleotide
aataatagctctattg

SEQ ID NO: 2411 - DNA, 16 bp, Artificial sequence
  Synthetic oligonucleotide
tgtccagaagtatgtg

SEQ ID NO: 2412 - DNA, 16 bp, Artificial sequence
  Synthetic oligonucleotide
aagagccaaactgcta

SEQ ID NO: 2413 - DNA, 16 bp, Artificial sequence
  Synthetic oligonucleotide
tcaacctgcacaccat

SEQ ID NO: 2414 - DNA, 16 bp, Artificial sequence
  Synthetic oligonucleotide
gtaggctaaaccctgg

SEQ ID NO: 2415 - DNA, 16 bp, Artificial sequence
  Synthetic oligonucleotide
atgttttgatccaggg

SEQ ID NO: 2416 - DNA, 16 bp, Artificial sequence
  Synthetic oligonucleotide
ttgtctaaacatctct

SEQ ID NO: 2417 - DNA, 16 bp, Artificial sequence
  Synthetic oligonucleotide
catcccctaagttatt

SEQ ID NO: 2418 - DNA, 16 bp, Artificial sequence
  Synthetic oligonucleotide
ccatggatctagaaca

SEQ ID NO: 2419 - DNA, 16 bp, Artificial sequence
  Synthetic oligonucleotide
cgttaggtttccaaat

SEQ ID NO: 2420 - DNA, 16 bp, Artificial sequence
  Synthetic oligonucleotide
tagagtgaatcattca

SEQ ID NO: 2421 - DNA, 16 bp, Artificial sequence
  Synthetic oligonucleotide
taatcttgaggcagga

SEQ ID NO: 2422 - DNA, 16 bp, Artificial sequence
  Synthetic oligonucleotide
ggtaacggtgatcaaa

SEQ ID NO: 2423 - DNA, 16 bp, Artificial sequence
  Synthetic oligonucleotide
tctacactaatattga

SEQ ID NO: 2424 - DNA, 16 bp, Artificial sequence
  Synthetic oligonucleotide
ccccgaattatttctt

SEQ ID NO: 2425 - DNA, 16 bp, Artificial sequence
  Synthetic oligonucleotide
caaccaaacttccagc

SEQ ID NO: 2426 - DNA, 16 bp, Artificial sequence
  Synthetic oligonucleotide
tgcagaaattcacctt

SEQ ID NO: 2427 - DNA, 16 bp, Artificial sequence
  Synthetic oligonucleotide
cttctattgtatgagg

SEQ ID NO: 2428 - DNA, 16 bp, Artificial sequence
  Synthetic oligonucleotide
tcttacatgattaagc

SEQ ID NO: 2429 - DNA, 16 bp, Artificial sequence
  Synthetic oligonucleotide
taaaatagggtgcagt

SEQ ID NO: 2430 - DNA, 16 bp, Artificial sequence
  Synthetic oligonucleotide
attacagcatcaagac

SEQ ID NO: 2431 - DNA, 16 bp, Artificial sequence
  Synthetic oligonucleotide
ttatgtgattgagttc

SEQ ID NO: 2432 - DNA, 16 bp, Artificial sequence
  Synthetic oligonucleotide
atttttggtgaaccca

SEQ ID NO: 2433 - DNA, 16 bp, Artificial sequence
  Synthetic oligonucleotide
cgtttactcacttctg

SEQ ID NO: 2434 - DNA, 16 bp, Artificial sequence
  Synthetic oligonucleotide
ataataatagctctat

SEQ ID NO: 2435 - DNA, 16 bp, Artificial sequence
  Synthetic oligonucleotide
tttatgtaagcacaga

SEQ ID NO: 2436 - DNA, 16 bp, Artificial sequence
  Synthetic oligonucleotide
atagtccatgcaaaag

SEQ ID NO: 2437 - DNA, 16 bp, Artificial sequence
  Synthetic oligonucleotide
attctgtgttcttgtt

SEQ ID NO: 2438 - DNA, 16 bp, Artificial sequence
  Synthetic oligonucleotide
aagttagtatagttat

SEQ ID NO: 2439 - DNA, 16 bp, Artificial sequence
  Synthetic oligonucleotide
tagcaatttagcaaga

SEQ ID NO: 2440 - DNA, 16 bp, Artificial sequence
  Synthetic oligonucleotide
tcttgacaatggttga

SEQ ID NO: 2441 - DNA, 16 bp, Artificial sequence
  Synthetic oligonucleotide
tattatgcactctata

SEQ ID NO: 2442 - DNA, 16 bp, Artificial sequence
  Synthetic oligonucleotide
ttttactgggatacta

SEQ ID NO: 2443 - DNA, 16 bp, Artificial sequence
  Synthetic oligonucleotide
ttgaattcactatctc

SEQ ID NO: 2444 - DNA, 16 bp, Artificial sequence
  Synthetic oligonucleotide
ttgaaccgtattccca

SEQ ID NO: 2445 - DNA, 16 bp, Artificial sequence
  Synthetic oligonucleotide
acagttgagtagtgta

SEQ ID NO: 2446 - DNA, 16 bp, Artificial sequence
  Synthetic oligonucleotide
aatcagttttcctcat

SEQ ID NO: 2447 - DNA, 16 bp, Artificial sequence
  Synthetic oligonucleotide
ttcatagtggacttca

SEQ ID NO: 2448 - DNA, 16 bp, Artificial sequence
  Synthetic oligonucleotide
cacaagtaaggtaaag

SEQ ID NO: 2449 - DNA, 16 bp, Artificial sequence
  Synthetic oligonucleotide
ctagttgcaatgagat

SEQ ID NO: 2450 - DNA, 16 bp, Artificial sequence
  Synthetic oligonucleotide
ggtaagccccatgcca

SEQ ID NO: 2451 - DNA, 16 bp, Artificial sequence
  Synthetic oligonucleotide
cacaagcacactgtaa

SEQ ID NO: 2452 - DNA, 16 bp, Artificial sequence
  Synthetic oligonucleotide
gccagattgcacaaac

SEQ ID NO: 2453 - DNA, 16 bp, Artificial sequence
  Synthetic oligonucleotide
gcagagacagtagatt

SEQ ID NO: 2454 - DNA, 16 bp, Artificial sequence
  Synthetic oligonucleotide
ttatgtaccaaacttg

SEQ ID NO: 2455 - DNA, 16 bp, Artificial sequence
  Synthetic oligonucleotide
aggatacctgaaaagc

SEQ ID NO: 2456 - DNA, 16 bp, Artificial sequence
  Synthetic oligonucleotide
aacataggcttagtgt

SEQ ID NO: 2457 - DNA, 16 bp, Artificial sequence
  Synthetic oligonucleotide
atcctgtaaacacttc

SEQ ID NO: 2458 - DNA, 16 bp, Artificial sequence
  Synthetic oligonucleotide
aggaagtgatccatat

SEQ ID NO: 2459 - DNA, 16 bp, Artificial sequence
  Synthetic oligonucleotide
aggcaaagatctggcc

SEQ ID NO: 2460 - DNA, 16 bp, Artificial sequence
  Synthetic oligonucleotide
gcaccccatggatcta

SEQ ID NO: 2461 - DNA, 16 bp, Artificial sequence
  Synthetic oligonucleotide
ttcagagttatacaga

SEQ ID NO: 2462 - DNA, 16 bp, Artificial sequence
  Synthetic oligonucleotide
ccatcccctaagttat

SEQ ID NO: 2463 - DNA, 16 bp, Artificial sequence
  Synthetic oligonucleotide
ctttgcagcattgatt

SEQ ID NO: 2464 - DNA, 16 bp, Artificial sequence
  Synthetic oligonucleotide
gaactgtgttgcttgt

SEQ ID NO: 2465 - DNA, 16 bp, Artificial sequence
  Synthetic oligonucleotide
tacgacaggtcatctt

SEQ ID NO: 2466 - DNA, 16 bp, Artificial sequence
  Synthetic oligonucleotide
atggtaaactgtatgc

SEQ ID NO: 2467 - DNA, 16 bp, Artificial sequence
  Synthetic oligonucleotide
attcacatatgtgaag

SEQ ID NO: 2468 - DNA, 16 bp, Artificial sequence
  Synthetic oligonucleotide
tttttggacaaatgcc

SEQ ID NO: 2469 - DNA, 16 bp, Artificial sequence
  Synthetic oligonucleotide
agaaatttgtgaacct

SEQ ID NO: 2470 - DNA, 16 bp, Artificial sequence
  Synthetic oligonucleotide
atgcaagatttacttc

SEQ ID NO: 2471 - DNA, 16 bp, Artificial sequence
  Synthetic oligonucleotide
ttagagtgaatcattc

SEQ ID NO: 2472 - DNA, 16 bp, Artificial sequence
  Synthetic oligonucleotide
tgctactctaggagat

SEQ ID NO: 2473 - DNA, 16 bp, Artificial sequence
  Synthetic oligonucleotide
cagtatcccctcaaat

SEQ ID NO: 2474 - DNA, 16 bp, Artificial sequence
  Synthetic oligonucleotide
aattgtctaaacatct

SEQ ID NO: 2475 - DNA, 16 bp, Artificial sequence
  Synthetic oligonucleotide
cagagttattgtaggg

SEQ ID NO: 2476 - DNA, 16 bp, Artificial sequence
  Synthetic oligonucleotide
attgcataagagccaa

SEQ ID NO: 2477 - DNA, 16 bp, Artificial sequence
  Synthetic oligonucleotide
gaagaagtgcttttgt

SEQ ID NO: 2478 - DNA, 16 bp, Artificial sequence
  Synthetic oligonucleotide
agctacctccaaattc

SEQ ID NO: 2479 - DNA, 16 bp, Artificial sequence
  Synthetic oligonucleotide
aacaacccagcctcgg

SEQ ID NO: 2480 - DNA, 16 bp, Artificial sequence
  Synthetic oligonucleotide
agctgagagttctaca

SEQ ID NO: 2481 - DNA, 16 bp, Artificial sequence
  Synthetic oligonucleotide
atcaacctgcacacca

SEQ ID NO: 2482 - DNA, 16 bp, Artificial sequence
  Synthetic oligonucleotide
tataactggaaggagg

SEQ ID NO: 2483 - DNA, 16 bp, Artificial sequence
  Synthetic oligonucleotide
tcaaatgaggcggcac

SEQ ID NO: 2484 - DNA, 16 bp, Artificial sequence
  Synthetic oligonucleotide
ggaatgctcatattaa

SEQ ID NO: 2485 - DNA, 16 bp, Artificial sequence
  Synthetic oligonucleotide
tgctgcattaatgcca

SEQ ID NO: 2486 - DNA, 16 bp, Artificial sequence
  Synthetic oligonucleotide
taactgagctagacaa

SEQ ID NO: 2487 - DNA, 16 bp, Artificial sequence
  Synthetic oligonucleotide
gtacatgccaagcttt

SEQ ID NO: 2488 - DNA, 16 bp, Artificial sequence
  Synthetic oligonucleotide
ataggcagtaaagtgc

SEQ ID NO: 2489 - DNA, 16 bp, Artificial sequence
  Synthetic oligonucleotide
ctgtcataaaggtggg

SEQ ID NO: 2490 - DNA, 16 bp, Artificial sequence
  Synthetic oligonucleotide
tccaagtaattacttc

SEQ ID NO: 2491 - DNA, 16 bp, Artificial sequence
  Synthetic oligonucleotide
ctaatttagtcaactt

SEQ ID NO: 2492 - DNA, 16 bp, Artificial sequence
  Synthetic oligonucleotide
taagttaccagagcat

SEQ ID NO: 2493 - DNA, 16 bp, Artificial sequence
  Synthetic oligonucleotide
gatggtaagtcaaata

SEQ ID NO: 2494 - DNA, 16 bp, Artificial sequence
  Synthetic oligonucleotide
ttggccgaggagggcg

SEQ ID NO: 2495 - DNA, 16 bp, Artificial sequence
  Synthetic oligonucleotide
tctaaagggctgctct

SEQ ID NO: 2496 - DNA, 16 bp, Artificial sequence
  Synthetic oligonucleotide
cgctactgtaggctaa

SEQ ID NO: 2497 - DNA, 16 bp, Artificial sequence
  Synthetic oligonucleotide
attgatacaccaatgc

SEQ ID NO: 2498 - DNA, 16 bp, Artificial sequence
  Synthetic oligonucleotide
ataaagctttgcagca

SEQ ID NO: 2499 - DNA, 16 bp, Artificial sequence
  Synthetic oligonucleotide
taagctgagagttcta

SEQ ID NO: 2500 - DNA, 16 bp, Artificial sequence
  Synthetic oligonucleotide
ctataactggaaggag

SEQ ID NO: 2501 - DNA, 16 bp, Artificial sequence
  Synthetic oligonucleotide
tgtacaaatttatgcc

SEQ ID NO: 2502 - DNA, 16 bp, Artificial sequence
  Synthetic oligonucleotide
gaagccactgtgacga

SEQ ID NO: 2503 - DNA, 16 bp, Artificial sequence
  Synthetic oligonucleotide
caattcacatatgtga

SEQ ID NO: 2504 - DNA, 16 bp, Artificial sequence
  Synthetic oligonucleotide
aggtatgtcatacttc

SEQ ID NO: 2505 - DNA, 16 bp, Artificial sequence
  Synthetic oligonucleotide
gataaaatagggtgca

SEQ ID NO: 2506 - DNA, 16 bp, Artificial sequence
  Synthetic oligonucleotide
atttgctgcattaatg

SEQ ID NO: 2507 - DNA, 16 bp, Artificial sequence
  Synthetic oligonucleotide
attatgtgattgagtt

SEQ ID NO: 2508 - DNA, 16 bp, Artificial sequence
  Synthetic oligonucleotide
gcccatcccctaagtt

SEQ ID NO: 2509 - DNA, 16 bp, Artificial sequence
  Synthetic oligonucleotide
tgccccgaattatttc

SEQ ID NO: 2510 - DNA, 16 bp, Artificial sequence
  Synthetic oligonucleotide
gcttacgacaggtcat

SEQ ID NO: 2511 - DNA, 16 bp, Artificial sequence
  Synthetic oligonucleotide
cataataatagctcta

SEQ ID NO: 2512 - DNA, 16 bp, Artificial sequence
  Synthetic oligonucleotide
tgactaatgcaagatt

SEQ ID NO: 2513 - DNA, 16 bp, Artificial sequence
  Synthetic oligonucleotide
ttaagtactgtgagac

SEQ ID NO: 2514 - DNA, 16 bp, Artificial sequence
  Synthetic oligonucleotide
gttcaactgaacctct

SEQ ID NO: 2515 - DNA, 16 bp, Artificial sequence
  Synthetic oligonucleotide
tgagagtataaatggc

SEQ ID NO: 2516 - DNA, 16 bp, Artificial sequence
  Synthetic oligonucleotide
tattctcttgacaatg

SEQ ID NO: 2517 - DNA, 16 bp, Artificial sequence
  Synthetic oligonucleotide
ttctatgcaagccttc

SEQ ID NO: 2518 - DNA, 16 bp, Artificial sequence
  Synthetic oligonucleotide
ttatgaagttagtata

SEQ ID NO: 2519 - DNA, 16 bp, Artificial sequence
  Synthetic oligonucleotide
gacactaatttagtca

SEQ ID NO: 2520 - DNA, 16 bp, Artificial sequence
  Synthetic oligonucleotide
gatagtccatgcaaaa

SEQ ID NO: 2521 - DNA, 16 bp, Artificial sequence
  Synthetic oligonucleotide
gatttttggtgaaccc

SEQ ID NO: 2522 - DNA, 16 bp, Artificial sequence
  Synthetic oligonucleotide
attgaattcactatct

SEQ ID NO: 2523 - DNA, 16 bp, Artificial sequence
  Synthetic oligonucleotide
gcaaggatacctgaaa

SEQ ID NO: 2524 - DNA, 16 bp, Artificial sequence
  Synthetic oligonucleotide
ctgctactctaggaga

SEQ ID NO: 2525 - DNA, 16 bp, Artificial sequence
  Synthetic oligonucleotide
aattgatacaccaatg

SEQ ID NO: 2526 - DNA, 16 bp, Artificial sequence
  Synthetic oligonucleotide
tatcaacctgcacacc

SEQ ID NO: 2527 - DNA, 16 bp, Artificial sequence
  Synthetic oligonucleotide
attttactgggatact

SEQ ID NO: 2528 - DNA, 16 bp, Artificial sequence
  Synthetic oligonucleotide
ttgcagaaattcacct

SEQ ID NO: 2529 - DNA, 16 bp, Artificial sequence
  Synthetic oligonucleotide
agagcataagttacca

SEQ ID NO: 2530 - DNA, 16 bp, Artificial sequence
  Synthetic oligonucleotide
agacagttgagtagtg

SEQ ID NO: 2531 - DNA, 16 bp, Artificial sequence
  Synthetic oligonucleotide
aaactaggaagtgatc

SEQ ID NO: 2532 - DNA, 16 bp, Artificial sequence
  Synthetic oligonucleotide
tttttgaaccgtattc

SEQ ID NO: 2533 - DNA, 16 bp, Artificial sequence
  Synthetic oligonucleotide
cagcaaagtttgggca

SEQ ID NO: 2534 - DNA, 16 bp, Artificial sequence
  Synthetic oligonucleotide
gattacagcatcaaga

SEQ ID NO: 2535 - DNA, 16 bp, Artificial sequence
  Synthetic oligonucleotide
tagaactgtgttgctt

SEQ ID NO: 2536 - DNA, 16 bp, Artificial sequence
  Synthetic oligonucleotide
tgtttatgtaagcaca

SEQ ID NO: 2537 - DNA, 16 bp, Artificial sequence
  Synthetic oligonucleotide
gaacactgtcataaag

SEQ ID NO: 2538 - DNA, 16 bp, Artificial sequence
  Synthetic oligonucleotide
atcacaagtaaggtaa

SEQ ID NO: 2539 - DNA, 16 bp, Artificial sequence
  Synthetic oligonucleotide
ccaaccaaacttccag

SEQ ID NO: 2540 - DNA, 16 bp, Artificial sequence
  Synthetic oligonucleotide
attgtaatcttgaggc

SEQ ID NO: 2541 - DNA, 16 bp, Artificial sequence
  Synthetic oligonucleotide
ctcctggtacatgcca

SEQ ID NO: 2542 - DNA, 16 bp, Artificial sequence
  Synthetic oligonucleotide
taatggtaaactgtat

SEQ ID NO: 2543 - DNA, 16 bp, Artificial sequence
  Synthetic oligonucleotide
cctagttgcaatgaga

SEQ ID NO: 2544 - DNA, 16 bp, Artificial sequence
  Synthetic oligonucleotide
gtggtaacggtgatca

SEQ ID NO: 2545 - DNA, 16 bp, Artificial sequence
  Synthetic oligonucleotide
gggaatgctcatatta

SEQ ID NO: 2546 - DNA, 16 bp, Artificial sequence
  Synthetic oligonucleotide
tgtcagagactctgtg

SEQ ID NO: 2547 - DNA, 16 bp, Artificial sequence
  Synthetic oligonucleotide
cgtcctaggaaacaaa

SEQ ID NO: 2548 - DNA, 16 bp, Artificial sequence
  Synthetic oligonucleotide
ctacatgacctgggtc

SEQ ID NO: 2549 - DNA, 16 bp, Artificial sequence
  Synthetic oligonucleotide
ggagtacttcacaatt

SEQ ID NO: 2550 - DNA, 16 bp, Artificial sequence
  Synthetic oligonucleotide
gattgcataagagcca

SEQ ID NO: 2551 - DNA, 16 bp, Artificial sequence
  Synthetic oligonucleotide
tcagtatcccctcaaa

SEQ ID NO: 2552 - DNA, 16 bp, Artificial sequence
  Synthetic oligonucleotide
ggaccaatataatcca

SEQ ID NO: 2553 - DNA, 16 bp, Artificial sequence
  Synthetic oligonucleotide
acatccaagtaattac

SEQ ID NO: 2554 - DNA, 16 bp, Artificial sequence
  Synthetic oligonucleotide
tgccagattgcacaaa

SEQ ID NO: 2555 - DNA, 16 bp, Artificial sequence
  Synthetic oligonucleotide
aacttcatagtggact

SEQ ID NO: 2556 - DNA, 16 bp, Artificial sequence
  Synthetic oligonucleotide
gcaagccaacagagag

SEQ ID NO: 2557 - DNA, 16 bp, Artificial sequence
  Synthetic oligonucleotide
tttagtcaggtagagt

SEQ ID NO: 2558 - DNA, 16 bp, Artificial sequence
  Synthetic oligonucleotide
tgtatagctgcatttc

SEQ ID NO: 2559 - DNA, 16 bp, Artificial sequence
  Synthetic oligonucleotide
tttcgctactgtaggc

SEQ ID NO: 2560 - DNA, 16 bp, Artificial sequence
  Synthetic oligonucleotide
cagccttagagtgaat

SEQ ID NO: 2561 - DNA, 16 bp, Artificial sequence
  Synthetic oligonucleotide
gagatttgaaggttag

SEQ ID NO: 2562 - DNA, 16 bp, Artificial sequence
  Synthetic oligonucleotide
agtaatcagttttcct

SEQ ID NO: 2563 - DNA, 16 bp, Artificial sequence
  Synthetic oligonucleotide
acttcagagttataca

SEQ ID NO: 2564 - DNA, 16 bp, Artificial sequence
  Synthetic oligonucleotide
cattcggctaggcgcg

SEQ ID NO: 2565 - DNA, 16 bp, Artificial sequence
  Synthetic oligonucleotide
caagctacctccaaat

SEQ ID NO: 2566 - DNA, 16 bp, Artificial sequence
  Synthetic oligonucleotide
cattctgtgttcttgt

SEQ ID NO: 2567 - DNA, 16 bp, Artificial sequence
  Synthetic oligonucleotide
gtagatggtaagtcaa

SEQ ID NO: 2568 - DNA, 16 bp, Artificial sequence
  Synthetic oligonucleotide
aaattgtctaaacatc

SEQ ID NO: 2569 - DNA, 16 bp, Artificial sequence
  Synthetic oligonucleotide
actggatggatttctc

SEQ ID NO: 2570 - DNA, 16 bp, Artificial sequence
  Synthetic oligonucleotide
atggtaagccccatgc

SEQ ID NO: 2571 - DNA, 16 bp, Artificial sequence
  Synthetic oligonucleotide
gtaataggcagtaaag

SEQ ID NO: 2572 - DNA, 16 bp, Artificial sequence
  Synthetic oligonucleotide
aagagtcagtatcctc

SEQ ID NO: 2573 - DNA, 16 bp, Artificial sequence
  Synthetic oligonucleotide
attctacactaatatt

SEQ ID NO: 2574 - DNA, 16 bp, Artificial sequence
  Synthetic oligonucleotide
ataactgagctagaca

SEQ ID NO: 2575 - DNA, 16 bp, Artificial sequence
  Synthetic oligonucleotide
gttattctcttgacaa

SEQ ID NO: 2576 - DNA, 16 bp, Artificial sequence
  Synthetic oligonucleotide
aacttttagtcaggta

SEQ ID NO: 2577 - DNA, 16 bp, Artificial sequence
  Synthetic oligonucleotide
cccaaccaaacttcca

SEQ ID NO: 2578 - DNA, 16 bp, Artificial sequence
  Synthetic oligonucleotide
atgggatgaggtaagg

SEQ ID NO: 2579 - DNA, 16 bp, Artificial sequence
  Synthetic oligonucleotide
acaatcaggagttgca

SEQ ID NO: 2580 - DNA, 16 bp, Artificial sequence
  Synthetic oligonucleotide
ttagcttaaactccaa

SEQ ID NO: 2581 - DNA, 16 bp, Artificial sequence
  Synthetic oligonucleotide
cttgcagaaattcacc

SEQ ID NO: 2582 - DNA, 16 bp, Artificial sequence
  Synthetic oligonucleotide
catctagaattaaggg

SEQ ID NO: 2583 - DNA, 16 bp, Artificial sequence
  Synthetic oligonucleotide
ctttgagactcttgtt

SEQ ID NO: 2584 - DNA, 16 bp, Artificial sequence
  Synthetic oligonucleotide
aggcttatgaagttag

SEQ ID NO: 2585 - DNA, 16 bp, Artificial sequence
  Synthetic oligonucleotide
gttgactaatgcaaga

SEQ ID NO: 2586 - DNA, 16 bp, Artificial sequence
  Synthetic oligonucleotide
aaattgatacaccaat

SEQ ID NO: 2587 - DNA, 16 bp, Artificial sequence
  Synthetic oligonucleotide
tgcttacgacaggtca

SEQ ID NO: 2588 - DNA, 16 bp, Artificial sequence
  Synthetic oligonucleotide
atccattctatgcaag

SEQ ID NO: 2589 - DNA, 16 bp, Artificial sequence
  Synthetic oligonucleotide
aaacttgatctcttag

SEQ ID NO: 2590 - DNA, 16 bp, Artificial sequence
  Synthetic oligonucleotide
ctaaaattgtctaaac

SEQ ID NO: 2591 - DNA, 16 bp, Artificial sequence
  Synthetic oligonucleotide
ggtggtaacggtgatc

SEQ ID NO: 2592 - DNA, 16 bp, Artificial sequence
  Synthetic oligonucleotide
tgattacagcatcaag

SEQ ID NO: 2593 - DNA, 16 bp, Artificial sequence
  Synthetic oligonucleotide
ggatagtccatgcaaa

SEQ ID NO: 2594 - DNA, 16 bp, Artificial sequence
  Synthetic oligonucleotide
tcttataagactataa

SEQ ID NO: 2595 - DNA, 16 bp, Artificial sequence
  Synthetic oligonucleotide
agctaagagacacttc

SEQ ID NO: 2596 - DNA, 16 bp, Artificial sequence
  Synthetic oligonucleotide
gaacagttcaactgaa

SEQ ID NO: 2597 - DNA, 16 bp, Artificial sequence
  Synthetic oligonucleotide
tattatcaggactgaa

SEQ ID NO: 2598 - DNA, 16 bp, Artificial sequence
  Synthetic oligonucleotide
taatcacaagtaaggt

SEQ ID NO: 2599 - DNA, 16 bp, Artificial sequence
  Synthetic oligonucleotide
gggaccaatataatcc

SEQ ID NO: 2600 - DNA, 16 bp, Artificial sequence
  Synthetic oligonucleotide
acaacccttaacaaac

SEQ ID NO: 2601 - DNA, 16 bp, Artificial sequence
  Synthetic oligonucleotide
ccaactatgtaatagg

SEQ ID NO: 2602 - DNA, 16 bp, Artificial sequence
  Synthetic oligonucleotide
tattaagacagttgag

SEQ ID NO: 2603 - DNA, 16 bp, Artificial sequence
  Synthetic oligonucleotide
ttctcaaggagtactt

SEQ ID NO: 2604 - DNA, 16 bp, Artificial sequence
  Synthetic oligonucleotide
tatatgaggtctgtat

SEQ ID NO: 2605 - DNA, 16 bp, Artificial sequence
  Synthetic oligonucleotide
ccaacccaagctacct

SEQ ID NO: 2606 - DNA, 16 bp, Artificial sequence
  Synthetic oligonucleotide
agtcagtatcccctca

SEQ ID NO: 2607 - DNA, 16 bp, Artificial sequence
  Synthetic oligonucleotide
ctgccagattgcacaa

SEQ ID NO: 2608 - DNA, 16 bp, Artificial sequence
  Synthetic oligonucleotide
attacagccttagagt

SEQ ID NO: 2609 - DNA, 16 bp, Artificial sequence
  Synthetic oligonucleotide
ctatcaacctgcacac

SEQ ID NO: 2610 - DNA, 16 bp, Artificial sequence
  Synthetic oligonucleotide
gcctagttgcaatgag

SEQ ID NO: 2611 - DNA, 16 bp, Artificial sequence
  Synthetic oligonucleotide
taacattcggctaggc

SEQ ID NO: 2612 - DNA, 16 bp, Artificial sequence
  Synthetic oligonucleotide
ctgcgcacatatttta

SEQ ID NO: 2613 - DNA, 16 bp, Artificial sequence
  Synthetic oligonucleotide
tagagagcataagtta

SEQ ID NO: 2614 - DNA, 16 bp, Artificial sequence
  Synthetic oligonucleotide
tgattgaattcactat

SEQ ID NO: 2615 - DNA, 16 bp, Artificial sequence
  Synthetic oligonucleotide
ccaaaaatcagccact

SEQ ID NO: 2616 - DNA, 16 bp, Artificial sequence
  Synthetic oligonucleotide
gcagctaaaatccaat

SEQ ID NO: 2617 - DNA, 16 bp, Artificial sequence
  Synthetic oligonucleotide
aacctttgttgcctgg

SEQ ID NO: 2618 - DNA, 16 bp, Artificial sequence
  Synthetic oligonucleotide
gaggtatgtcatactt

SEQ ID NO: 2619 - DNA, 16 bp, Artificial sequence
  Synthetic oligonucleotide
tattccaggatttgct

SEQ ID NO: 2620 - DNA, 16 bp, Artificial sequence
  Synthetic oligonucleotide
taagtagatggtaagt

SEQ ID NO: 2621 - DNA, 16 bp, Artificial sequence
  Synthetic oligonucleotide
ggccaagggaacactg

SEQ ID NO: 2622 - DNA, 16 bp, Artificial sequence
  Synthetic oligonucleotide
atgtttatgtaagcac

SEQ ID NO: 2623 - DNA, 16 bp, Artificial sequence
  Synthetic oligonucleotide
atcccgttcttgccca

SEQ ID NO: 2624 - DNA, 16 bp, Artificial sequence
  Synthetic oligonucleotide
ccttaccttgtgcttg

SEQ ID NO: 2625 - DNA, 16 bp, Artificial sequence
  Synthetic oligonucleotide
atctcacaagggaaat

SEQ ID NO: 2626 - DNA, 16 bp, Artificial sequence
  Synthetic oligonucleotide
ctagtggtaatggtaa

SEQ ID NO: 2627 - DNA, 16 bp, Artificial sequence
  Synthetic oligonucleotide
ttggtatggtaagccc

SEQ ID NO: 2628 - DNA, 16 bp, Artificial sequence
  Synthetic oligonucleotide
tataactgagctagac

SEQ ID NO: 2629 - DNA, 16 bp, Artificial sequence
  Synthetic oligonucleotide
atatacatccaagtaa

SEQ ID NO: 2630 - DNA, 16 bp, Artificial sequence
  Synthetic oligonucleotide
cactggatggatttct

SEQ ID NO: 2631 - DNA, 16 bp, Artificial sequence
  Synthetic oligonucleotide
agtttagattgcataa

SEQ ID NO: 2632 - DNA, 16 bp, Artificial sequence
  Synthetic oligonucleotide
tagtcttcagcaaagt

SEQ ID NO: 2633 - DNA, 16 bp, Artificial sequence
  Synthetic oligonucleotide
atagcaagccaacaga

SEQ ID NO: 2634 - DNA, 16 bp, Artificial sequence
  Synthetic oligonucleotide
attattatgtgattga

SEQ ID NO: 2635 - DNA, 16 bp, Artificial sequence
  Synthetic oligonucleotide
ctagattctacactaa

SEQ ID NO: 2636 - DNA, 16 bp, Artificial sequence
  Synthetic oligonucleotide
tagtttggtgggcatg

SEQ ID NO: 2637 - DNA, 16 bp, Artificial sequence
  Synthetic oligonucleotide
taacttcatagtggac

SEQ ID NO: 2638 - DNA, 16 bp, Artificial sequence
  Synthetic oligonucleotide
ctccataataatagct

SEQ ID NO: 2639 - DNA, 16 bp, Artificial sequence
  Synthetic oligonucleotide
gtaagctgagagttct

SEQ ID NO: 2640 - DNA, 16 bp, Artificial sequence
  Synthetic oligonucleotide
tacgacttccttctaa

SEQ ID NO: 2641 - DNA, 16 bp, Artificial sequence
  Synthetic oligonucleotide
ccataaagctggattg

SEQ ID NO: 2642 - DNA, 16 bp, Artificial sequence
  Synthetic oligonucleotide
agaggcaaggatacct

SEQ ID NO: 2643 - DNA, 16 bp, Artificial sequence
  Synthetic oligonucleotide
agtaccaagacactaa

SEQ ID NO: 2644 - DNA, 16 bp, Artificial sequence
  Synthetic oligonucleotide
actacatgacctgggt

SEQ ID NO: 2645 - DNA, 16 bp, Artificial sequence
  Synthetic oligonucleotide
acttgaattctgtgtc

SEQ ID NO: 2646 - DNA, 16 bp, Artificial sequence
  Synthetic oligonucleotide
gaccatgctgctactc

SEQ ID NO: 2647 - DNA, 16 bp, Artificial sequence
  Synthetic oligonucleotide
cagcattgtaatcttg

SEQ ID NO: 2648 - DNA, 16 bp, Artificial sequence
  Synthetic oligonucleotide
gccagggaatgctcat

SEQ ID NO: 2649 - DNA, 16 bp, Artificial sequence
  Synthetic oligonucleotide
gtaagagtcagtatcc

SEQ ID NO: 2650 - DNA, 16 bp, Artificial sequence
  Synthetic oligonucleotide
tatttcgctactgtag

SEQ ID NO: 2651 - DNA, 16 bp, Artificial sequence
  Synthetic oligonucleotide
agagagtaatcagttt

SEQ ID NO: 2652 - DNA, 16 bp, Artificial sequence
  Synthetic oligonucleotide
tgtaagagtcagtatc

SEQ ID NO: 2653 - DNA, 16 bp, Artificial sequence
  Synthetic oligonucleotide
agtatgtttatgtaag

SEQ ID NO: 2654 - DNA, 16 bp, Artificial sequence
  Synthetic oligonucleotide
gactttgagactcttg

SEQ ID NO: 2655 - DNA, 16 bp, Artificial sequence
  Synthetic oligonucleotide
gatcctatatacatcc

SEQ ID NO: 2656 - DNA, 16 bp, Artificial sequence
  Synthetic oligonucleotide
tgcaacttttagtcag

SEQ ID NO: 2657 - DNA, 16 bp, Artificial sequence
  Synthetic oligonucleotide
atcccaaccaaacttc

SEQ ID NO: 2658 - DNA, 16 bp, Artificial sequence
  Synthetic oligonucleotide
atatgggatgaggtaa

SEQ ID NO: 2659 - DNA, 16 bp, Artificial sequence
  Synthetic oligonucleotide
ttccgtctcacaatct

SEQ ID NO: 2660 - DNA, 16 bp, Artificial sequence
  Synthetic oligonucleotide
tcagaacagttcaact

SEQ ID NO: 2661 - DNA, 16 bp, Artificial sequence
  Synthetic oligonucleotide
atcttataagactata

SEQ ID NO: 2662 - DNA, 16 bp, Artificial sequence
  Synthetic oligonucleotide
gaatccattctatgca

SEQ ID NO: 2663 - DNA, 16 bp, Artificial sequence
  Synthetic oligonucleotide
agttattctcttgaca

SEQ ID NO: 2664 - DNA, 16 bp, Artificial sequence
  Synthetic oligonucleotide
gacataacttcatagt

SEQ ID NO: 2665 - DNA, 16 bp, Artificial sequence
  Synthetic oligonucleotide
gctccataataatagc

SEQ ID NO: 2666 - DNA, 16 bp, Artificial sequence
  Synthetic oligonucleotide
accttaccttgtgctt

SEQ ID NO: 2667 - DNA, 16 bp, Artificial sequence
  Synthetic oligonucleotide
tagtaccaagacacta

SEQ ID NO: 2668 - DNA, 16 bp, Artificial sequence
  Synthetic oligonucleotide
aaggcttatgaagtta

SEQ ID NO: 2669 - DNA, 16 bp, Artificial sequence
  Synthetic oligonucleotide
tgaaattgatacacca

SEQ ID NO: 2670 - DNA, 16 bp, Artificial sequence
  Synthetic oligonucleotide
cggcctattcttctgt

SEQ ID NO: 2671 - DNA, 16 bp, Artificial sequence
  Synthetic oligonucleotide
attaacattcggctag

SEQ ID NO: 2672 - DNA, 16 bp, Artificial sequence
  Synthetic oligonucleotide
aatatcagccatctag

SEQ ID NO: 2673 - DNA, 16 bp, Artificial sequence
  Synthetic oligonucleotide
tgccaaaccaatgttt

SEQ ID NO: 2674 - DNA, 16 bp, Artificial sequence
  Synthetic oligonucleotide
gacaacccttaacaaa

SEQ ID NO: 2675 - DNA, 16 bp, Artificial sequence
  Synthetic oligonucleotide
ataagtagatggtaag

SEQ ID NO: 2676 - DNA, 16 bp, Artificial sequence
  Synthetic oligonucleotide
tcaaaacctttgttgc

SEQ ID NO: 2677 - DNA, 16 bp, Artificial sequence
  Synthetic oligonucleotide
tgccagggaatgctca

SEQ ID NO: 2678 - DNA, 16 bp, Artificial sequence
  Synthetic oligonucleotide
atgtatgaggtctccg

SEQ ID NO: 2679 - DNA, 16 bp, Artificial sequence
  Synthetic oligonucleotide
accaagagggttttta

SEQ ID NO: 2680 - DNA, 16 bp, Artificial sequence
  Synthetic oligonucleotide
atttttaatacgactt

SEQ ID NO: 2681 - DNA, 16 bp, Artificial sequence
  Synthetic oligonucleotide
tgtaagctgagagttc

SEQ ID NO: 2682 - DNA, 16 bp, Artificial sequence
  Synthetic oligonucleotide
cccaacccaagctacc

SEQ ID NO: 2683 - DNA, 16 bp, Artificial sequence
  Synthetic oligonucleotide
cactttggtattgttg

SEQ ID NO: 2684 - DNA, 16 bp, Artificial sequence
  Synthetic oligonucleotide
gactgttgagctcaaa

SEQ ID NO: 2685 - DNA, 16 bp, Artificial sequence
  Synthetic oligonucleotide
agtagagagcataagt

SEQ ID NO: 2686 - DNA, 16 bp, Artificial sequence
  Synthetic oligonucleotide
gactacattaacacca

SEQ ID NO: 2687 - DNA, 16 bp, Artificial sequence
  Synthetic oligonucleotide
aaactagtggtaatgg

SEQ ID NO: 2688 - DNA, 16 bp, Artificial sequence
  Synthetic oligonucleotide
ctgattacagcatcaa

SEQ ID NO: 2689 - DNA, 16 bp, Artificial sequence
  Synthetic oligonucleotide
cttgagagtgattgcc

SEQ ID NO: 2690 - DNA, 16 bp, Artificial sequence
  Synthetic oligonucleotide
aggatagtccatgcaa

SEQ ID NO: 2691 - DNA, 16 bp, Artificial sequence
  Synthetic oligonucleotide
gatacaaatttattgg

SEQ ID NO: 2692 - DNA, 16 bp, Artificial sequence
  Synthetic oligonucleotide
cactgccagattgcac

SEQ ID NO: 2693 - DNA, 16 bp, Artificial sequence
  Synthetic oligonucleotide
ctttctatcaacctgc

SEQ ID NO: 2694 - DNA, 16 bp, Artificial sequence
  Synthetic oligonucleotide
agtatgacaactggag

SEQ ID NO: 2695 - DNA, 16 bp, Artificial sequence
  Synthetic oligonucleotide
cgtaaccatgcattaa

SEQ ID NO: 2696 - DNA, 16 bp, Artificial sequence
  Synthetic oligonucleotide
ccactggatggatttc

SEQ ID NO: 2697 - DNA, 16 bp, Artificial sequence
  Synthetic oligonucleotide
gttagcagctaaaatc

SEQ ID NO: 2698 - DNA, 16 bp, Artificial sequence
  Synthetic oligonucleotide
aaagtcagtatcccct

SEQ ID NO: 2699 - DNA, 16 bp, Artificial sequence
  Synthetic oligonucleotide
tcaactaaacatgaca

SEQ ID NO: 2700 - DNA, 16 bp, Artificial sequence
  Synthetic oligonucleotide
gaatcatgattgaatt

SEQ ID NO: 2701 - DNA, 16 bp, Artificial sequence
  Synthetic oligonucleotide
agatcccgttcttgcc

SEQ ID NO: 2702 - DNA, 16 bp, Artificial sequence
  Synthetic oligonucleotide
cgcaacagtttagatt

SEQ ID NO: 2703 - DNA, 16 bp, Artificial sequence
  Synthetic oligonucleotide
ttagcaagctaagaga

SEQ ID NO: 2704 - DNA, 16 bp, Artificial sequence
  Synthetic oligonucleotide
gggtggtaacggtgat

SEQ ID NO: 2705 - DNA, 16 bp, Artificial sequence
  Synthetic oligonucleotide
caaggaaaagcctgac

SEQ ID NO: 2706 - DNA, 16 bp, Artificial sequence
  Synthetic oligonucleotide
ctggtttcataaccta

SEQ ID NO: 2707 - DNA, 16 bp, Artificial sequence
  Synthetic oligonucleotide
ttatatgaggtctgta

SEQ ID NO: 2708 - DNA, 16 bp, Artificial sequence
  Synthetic oligonucleotide
ttgggaccaatataat

SEQ ID NO: 2709 - DNA, 16 bp, Artificial sequence
  Synthetic oligonucleotide
tgtgagaaggcggtat

SEQ ID NO: 2710 - DNA, 16 bp, Artificial sequence
  Synthetic oligonucleotide
tgtatttcgctactgt

SEQ ID NO: 2711 - DNA, 16 bp, Artificial sequence
  Synthetic oligonucleotide
aatagtcttcagcaaa

SEQ ID NO: 2712 - DNA, 16 bp, Artificial sequence
  Synthetic oligonucleotide
aagatacccaggttgc

SEQ ID NO: 2713 - DNA, 16 bp, Artificial sequence
  Synthetic oligonucleotide
gctttagcttaaactc

SEQ ID NO: 2714 - DNA, 16 bp, Artificial sequence
  Synthetic oligonucleotide
gtccacttgaattctg

SEQ ID NO: 2715 - DNA, 16 bp, Artificial sequence
  Synthetic oligonucleotide
tgagttacattacagc

SEQ ID NO: 2716 - DNA, 16 bp, Artificial sequence
  Synthetic oligonucleotide
gtgttagctttaattt

SEQ ID NO: 2717 - DNA, 16 bp, Artificial sequence
  Synthetic oligonucleotide
gaaacttgatctctta

SEQ ID NO: 2718 - DNA, 16 bp, Artificial sequence
  Synthetic oligonucleotide
gccctagattctacac

SEQ ID NO: 2719 - DNA, 16 bp, Artificial sequence
  Synthetic oligonucleotide
ttccataaagctggat

SEQ ID NO: 2720 - DNA, 16 bp, Artificial sequence
  Synthetic oligonucleotide
tacaacctggtttcat

SEQ ID NO: 2721 - DNA, 16 bp, Artificial sequence
  Synthetic oligonucleotide
agggagaccatgctgc

SEQ ID NO: 2722 - DNA, 16 bp, Artificial sequence
  Synthetic oligonucleotide
accaactatgtaatag

SEQ ID NO: 2723 - DNA, 16 bp, Artificial sequence
  Synthetic oligonucleotide
cagattattatgtgat

SEQ ID NO: 2724 - DNA, 16 bp, Artificial sequence
  Synthetic oligonucleotide
gtaactgtattaagac

SEQ ID NO: 2725 - DNA, 16 bp, Artificial sequence
  Synthetic oligonucleotide
ttcttgcagaaattca

SEQ ID NO: 2726 - DNA, 16 bp, Artificial sequence
  Synthetic oligonucleotide
aatagcaagccaacag

SEQ ID NO: 2727 - DNA, 16 bp, Artificial sequence
  Synthetic oligonucleotide
agtaatcacaagtaag

SEQ ID NO: 2728 - DNA, 16 bp, Artificial sequence
  Synthetic oligonucleotide
atctatcagacttctt

SEQ ID NO: 2729 - DNA, 16 bp, Artificial sequence
  Synthetic oligonucleotide
cagggtggtaacggtg

SEQ ID NO: 2730 - DNA, 16 bp, Artificial sequence
  Synthetic oligonucleotide
acccattctaacttga

SEQ ID NO: 2731 - DNA, 16 bp, Artificial sequence
  Synthetic oligonucleotide
taccaagagggttttt

SEQ ID NO: 2732 - DNA, 16 bp, Artificial sequence
  Synthetic oligonucleotide
ctgtaagagtcagtat

SEQ ID NO: 2733 - DNA, 16 bp, Artificial sequence
  Synthetic oligonucleotide
ttgacataacttcata

SEQ ID NO: 2734 - DNA, 16 bp, Artificial sequence
  Synthetic oligonucleotide
tgttagctaagggaga

SEQ ID NO: 2735 - DNA, 16 bp, Artificial sequence
  Synthetic oligonucleotide
cagcatattcatttgg

SEQ ID NO: 2736 - DNA, 16 bp, Artificial sequence
  Synthetic oligonucleotide
tgttaggacccagtct

SEQ ID NO: 2737 - DNA, 16 bp, Artificial sequence
  Synthetic oligonucleotide
ttcttgagagtgattg

SEQ ID NO: 2738 - DNA, 16 bp, Artificial sequence
  Synthetic oligonucleotide
gcccttaagtcatttt

SEQ ID NO: 2739 - DNA, 16 bp, Artificial sequence
  Synthetic oligonucleotide
attacaacctggtttc

SEQ ID NO: 2740 - DNA, 16 bp, Artificial sequence
  Synthetic oligonucleotide
cattagcaagctaaga

SEQ ID NO: 2741 - DNA, 16 bp, Artificial sequence
  Synthetic oligonucleotide
cactatcagaacagtt

SEQ ID NO: 2742 - DNA, 16 bp, Artificial sequence
  Synthetic oligonucleotide
cttgaatagcaagcca

SEQ ID NO: 2743 - DNA, 16 bp, Artificial sequence
  Synthetic oligonucleotide
ttagtaccaagacact

SEQ ID NO: 2744 - DNA, 16 bp, Artificial sequence
  Synthetic oligonucleotide
aagacattctagcctg

SEQ ID NO: 2745 - DNA, 16 bp, Artificial sequence
  Synthetic oligonucleotide
atggcttaattttcgg

SEQ ID NO: 2746 - DNA, 16 bp, Artificial sequence
  Synthetic oligonucleotide
agttattagaagtcag

SEQ ID NO: 2747 - DNA, 16 bp, Artificial sequence
  Synthetic oligonucleotide
atagtaatcacaagta

SEQ ID NO: 2748 - DNA, 16 bp, Artificial sequence
  Synthetic oligonucleotide
tgtgttagctttaatt

SEQ ID NO: 2749 - DNA, 16 bp, Artificial sequence
  Synthetic oligonucleotide
gagtatgacaactgga

SEQ ID NO: 2750 - DNA, 16 bp, Artificial sequence
  Synthetic oligonucleotide
ttggtaagtattccat

SEQ ID NO: 2751 - DNA, 16 bp, Artificial sequence
  Synthetic oligonucleotide
taagaggcatgaaagg

SEQ ID NO: 2752 - DNA, 16 bp, Artificial sequence
  Synthetic oligonucleotide
agttttgggaccaata

SEQ ID NO: 2753 - DNA, 16 bp, Artificial sequence
  Synthetic oligonucleotide
gagttattctcttgac

SEQ ID NO: 2754 - DNA, 16 bp, Artificial sequence
  Synthetic oligonucleotide
aattaacattcggcta

SEQ ID NO: 2755 - DNA, 16 bp, Artificial sequence
  Synthetic oligonucleotide
aatcccaaccaaactt

SEQ ID NO: 2756 - DNA, 16 bp, Artificial sequence
  Synthetic oligonucleotide
caagagacaccaccag

SEQ ID NO: 2757 - DNA, 16 bp, Artificial sequence
  Synthetic oligonucleotide
taaactagtggtaatg

SEQ ID NO: 2758 - DNA, 16 bp, Artificial sequence
  Synthetic oligonucleotide
cctttgtatttcgcta

SEQ ID NO: 2759 - DNA, 16 bp, Artificial sequence
  Synthetic oligonucleotide
ttcatagggagaccat

SEQ ID NO: 2760 - DNA, 16 bp, Artificial sequence
  Synthetic oligonucleotide
gtgtaagctgagagtt

SEQ ID NO: 2761 - DNA, 16 bp, Artificial sequence
  Synthetic oligonucleotide
acttaccaatatggga

SEQ ID NO: 2762 - DNA, 16 bp, Artificial sequence
  Synthetic oligonucleotide
atagctaagtatactt

SEQ ID NO: 2763 - DNA, 16 bp, Artificial sequence
  Synthetic oligonucleotide
atactgaaattgatac

SEQ ID NO: 2764 - DNA, 16 bp, Artificial sequence
  Synthetic oligonucleotide
gctaatgtatgaggtc

SEQ ID NO: 2765 - DNA, 16 bp, Artificial sequence
  Synthetic oligonucleotide
agaccaagtagcttac

SEQ ID NO: 2766 - DNA, 16 bp, Artificial sequence
  Synthetic oligonucleotide
gatctgagttacatta

SEQ ID NO: 2767 - DNA, 16 bp, Artificial sequence
  Synthetic oligonucleotide
gaaatcttgtgtaact

SEQ ID NO: 2768 - DNA, 16 bp, Artificial sequence
  Synthetic oligonucleotide
actgacaacccttaac

SEQ ID NO: 2769 - DNA, 16 bp, Artificial sequence
  Synthetic oligonucleotide
gaatagtcttcagcaa

SEQ ID NO: 2770 - DNA, 16 bp, Artificial sequence
  Synthetic oligonucleotide
ttctacagaagactac

SEQ ID NO: 2771 - DNA, 16 bp, Artificial sequence
  Synthetic oligonucleotide
actaaccaattatatg

SEQ ID NO: 2772 - DNA, 16 bp, Artificial sequence
  Synthetic oligonucleotide
tgctccataataatag

SEQ ID NO: 2773 - DNA, 16 bp, Artificial sequence
  Synthetic oligonucleotide
aatgtatcttataaga

SEQ ID NO: 2774 - DNA, 16 bp, Artificial sequence
  Synthetic oligonucleotide
agtcatattgaaaatc

SEQ ID NO: 2775 - DNA, 16 bp, Artificial sequence
  Synthetic oligonucleotide
agttagcagctaaaat

SEQ ID NO: 2776 - DNA, 16 bp, Artificial sequence
  Synthetic oligonucleotide
caacgcaacagtttag

SEQ ID NO: 2777 - DNA, 16 bp, Artificial sequence
  Synthetic oligonucleotide
agcattccatgattaa

SEQ ID NO: 2778 - DNA, 16 bp, Artificial sequence
  Synthetic oligonucleotide
ccaaggcttatgaagt

SEQ ID NO: 2779 - DNA, 16 bp, Artificial sequence
  Synthetic oligonucleotide
tctaaagtgctggttg

SEQ ID NO: 2780 - DNA, 16 bp, Artificial sequence
  Synthetic oligonucleotide
gcaccaactatgtaat

SEQ ID NO: 2781 - DNA, 16 bp, Artificial sequence
  Synthetic oligonucleotide
tcagatcccgttcttg

SEQ ID NO: 2782 - DNA, 16 bp, Artificial sequence
  Synthetic oligonucleotide
ctcctgagtctttcta

SEQ ID NO: 2783 - DNA, 16 bp, Artificial sequence
  Synthetic oligonucleotide
tgctttagcttaaact

SEQ ID NO: 2784 - DNA, 16 bp, Artificial sequence
  Synthetic oligonucleotide
gctaaaatggtcatct

SEQ ID NO: 2785 - DNA, 16 bp, Artificial sequence
  Synthetic oligonucleotide
tttataactacaagag

SEQ ID NO: 2786 - DNA, 16 bp, Artificial sequence
  Synthetic oligonucleotide
acagactgttgagctc

SEQ ID NO: 2787 - DNA, 16 bp, Artificial sequence
  Synthetic oligonucleotide
ttttgtccacctttaa

SEQ ID NO: 2788 - DNA, 16 bp, Artificial sequence
  Synthetic oligonucleotide
cgatcctatatacatc

SEQ ID NO: 2789 - DNA, 16 bp, Artificial sequence
  Synthetic oligonucleotide
tcccaacccaagctac

SEQ ID NO: 2790 - DNA, 16 bp, Artificial sequence
  Synthetic oligonucleotide
taagatacccaggttg

SEQ ID NO: 2791 - DNA, 16 bp, Artificial sequence
  Synthetic oligonucleotide
gaccagggaatttatc

SEQ ID NO: 2792 - DNA, 16 bp, Artificial sequence
  Synthetic oligonucleotide
tgaatcatgattgaat

SEQ ID NO: 2793 - DNA, 16 bp, Artificial sequence
  Synthetic oligonucleotide
gcattcatcagatgtt

SEQ ID NO: 2794 - DNA, 16 bp, Artificial sequence
  Synthetic oligonucleotide
ctgccagggaatgctc

SEQ ID NO: 2795 - DNA, 16 bp, Artificial sequence
  Synthetic oligonucleotide
acttttccgtctcaca

SEQ ID NO: 2796 - DNA, 16 bp, Artificial sequence
  Synthetic oligonucleotide
tcagtagagagcataa

SEQ ID NO: 2797 - DNA, 16 bp, Artificial sequence
  Synthetic oligonucleotide
tgagataaagctgcct

SEQ ID NO: 2798 - DNA, 16 bp, Artificial sequence
  Synthetic oligonucleotide
tggtagcttgctcact

SEQ ID NO: 2799 - DNA, 16 bp, Artificial sequence
  Synthetic oligonucleotide
gccactggatggattt

SEQ ID NO: 2800 - DNA, 16 bp, Artificial sequence
  Synthetic oligonucleotide
ctgcaacttttagtca

SEQ ID NO: 2801 - DNA, 16 bp, Artificial sequence
  Synthetic oligonucleotide
ctgccctagattctac

SEQ ID NO: 2802 - DNA, 16 bp, Artificial sequence
  Synthetic oligonucleotide
gagttagggagccagc

SEQ ID NO: 2803 - DNA, 16 bp, Artificial sequence
  Synthetic oligonucleotide
ttcaactaaacatgac

SEQ ID NO: 2804 - DNA, 16 bp, Artificial sequence
  Synthetic oligonucleotide
agactttgagactctt

SEQ ID NO: 2805 - DNA, 16 bp, Artificial sequence
  Synthetic oligonucleotide
gtttacaagtaagaac

SEQ ID NO: 2806 - DNA, 16 bp, Artificial sequence
  Synthetic oligonucleotide
gtgcatcttaagatac

SEQ ID NO: 2807 - DNA, 16 bp, Artificial sequence
  Synthetic oligonucleotide
ttaaaccttccctgtg

SEQ ID NO: 2808 - DNA, 16 bp, Artificial sequence
  Synthetic oligonucleotide
tatagactgggtagga

SEQ ID NO: 2809 - DNA, 16 bp, Artificial sequence
  Synthetic oligonucleotide
aggctgtaagagtcag

SEQ ID NO: 2810 - DNA, 16 bp, Artificial sequence
  Synthetic oligonucleotide
ggagtgcatcttaaga

SEQ ID NO: 2811 - DNA, 16 bp, Artificial sequence
  Synthetic oligonucleotide
aagttagcccccagga

SEQ ID NO: 2812 - DNA, 16 bp, Artificial sequence
  Synthetic oligonucleotide
cctcgatcctatatac

SEQ ID NO: 2813 - DNA, 16 bp, Artificial sequence
  Synthetic oligonucleotide
  misc_feature (5)..(5): bases at these positons are RNA
agtcutaaaccttccc

SEQ ID NO: 2814 - DNA, 16 bp, Artificial sequence
  Synthetic oligonucleotide
  misc_feature (5)..(5): bases at these positons are RNA
cagautggaatgctac

SEQ ID NO: 2815 - DNA, 16 bp, Artificial sequence
  Synthetic oligonucleotide
  misc_feature (5)..(5): bases at these positons are RNA
ggaaugctacttgaac

SEQ ID NO: 2816 - DNA, 16 bp, Artificial sequence
  Synthetic oligonucleotide
  misc_feature (5)..(5): bases at these positons are RNA
ttgauattctgtggca

SEQ ID NO: 2817 - DNA, 16 bp, Artificial sequence
  Synthetic oligonucleotide
  misc_feature (5)..(5): bases at these positons are RNA
gtgtucttgttgatat

SEQ ID NO: 2818 - DNA, 16 bp, Artificial sequence
  Synthetic oligonucleotide
  misc_feature (5)..(5): bases at these positons are RNA
ctctuagctgtgcact

SEQ ID NO: 2819 - DNA, 16 bp, Artificial sequence
  Synthetic oligonucleotide
  misc_feature (5)..(5): bases at these positons are RNA
aggtugagataaagct

SEQ ID NO: 2820 - DNA, 16 bp, Artificial sequence
  Synthetic oligonucleotide
  misc_feature (5)..(5): bases at these positons are RNA
gacaugaggttttgat

SEQ ID NO: 2821 - DNA, 16 bp, Artificial sequence
  Synthetic oligonucleotide
  misc_feature (5)..(5): bases at these positons are RNA
gagauaaagctgcctg

SEQ ID NO: 2822 - DNA, 16 bp, Artificial sequence
  Synthetic oligonucleotide
  misc_feature (5)..(5): bases at these positons are RNA
aggcuagggaaatctt

SEQ ID NO: 2823 - DNA, 16 bp, Artificial sequence
  Synthetic oligonucleotide
  misc_feature (5)..(5): bases at these positons are RNA
ccgtuttgggctaatg

SEQ ID NO: 2824 - DNA, 16 bp, Artificial sequence
  Synthetic oligonucleotide
  misc_feature (5)..(5): bases at these positons are RNA
atctuataagactata

SEQ ID NO: 2825 - DNA, 16 bp, Artificial sequence
  Synthetic oligonucleotide
  misc_feature (5)..(5): bases at these positons are RNA
gagtugcaccgttttg

SEQ ID NO: 2826 - DNA, 16 bp, Artificial sequence
  Synthetic oligonucleotide
  misc_feature (5)..(5): bases at these positons are RNA
aaaauagagtcggtca

SEQ ID NO: 2827 - DNA, 16 bp, Artificial sequence
  Synthetic oligonucleotide
  misc_feature (5)..(5): bases at these positons are RNA
catcuctgggaccaag

SEQ ID NO: 2828 - DNA, 16 bp, Artificial sequence
  Synthetic oligonucleotide
  misc_feature (5)..(5): bases at these positons are RNA
cctgugttagctttaa

SEQ ID NO: 2829 - DNA, 16 bp, Artificial sequence
  Synthetic oligonucleotide
  misc_feature (5)..(5): bases at these positons are RNA
tgtcuaaacatctctg

SEQ ID NO: 2830 - DNA, 16 bp, Artificial sequence
  Synthetic oligonucleotide
  misc_feature (5)..(5): bases at these positons are RNA
tttcutatgtaatagc

SEQ ID NO: 2831 - DNA, 16 bp, Artificial sequence
  Synthetic oligonucleotide
  misc_feature (5)..(5): bases at these positons are RNA
gtaauagccagtacag

SEQ ID NO: 2832 - DNA, 16 bp, Artificial sequence
  Synthetic oligonucleotide
  misc_feature (5)..(5): bases at these positons are RNA
ttagucttgatgtagt

SEQ ID NO: 2833 - DNA, 16 bp, Artificial sequence
  Synthetic oligonucleotide
  misc_feature (5)..(5): bases at these positons are RNA
aggauagtccatgcaa

SEQ ID NO: 2834 - DNA, 16 bp, Artificial sequence
  Synthetic oligonucleotide
  misc_feature (5)..(5): bases at these positons are RNA
atccuatatacatcca

SEQ ID NO: 2835 - DNA, 16 bp, Artificial sequence
  Synthetic oligonucleotide
  misc_feature (5)..(5): bases at these positons are RNA
cataugtgaagagctg

SEQ ID NO: 2836 - DNA, 16 bp, Artificial sequence
  Synthetic oligonucleotide
  misc_feature (5)..(5): bases at these positons are RNA
gttautctcttgacaa

SEQ ID NO: 2837 - DNA, 16 bp, Artificial sequence
  Synthetic oligonucleotide
  misc_feature (5)..(5): bases at these positons are RNA
ttgguaagtattccat

SEQ ID NO: 2838 - DNA, 16 bp, Artificial sequence
  Synthetic oligonucleotide
  misc_feature (5)..(5): bases at these positons are RNA
gaagutagtatagtta

SEQ ID NO: 2839 - DNA, 16 bp, Artificial sequence
  Synthetic oligonucleotide
  misc_feature (5)..(5): bases at these positons are RNA
tgcaucttaagatacc

SEQ ID NO: 2840 - DNA, 16 bp, Artificial sequence
  Synthetic oligonucleotide
  misc_feature (5)..(5): bases at these positons are RNA
aagauacccaggttgc

SEQ ID NO: 2841 - DNA, 16 bp, Artificial sequence
  Synthetic oligonucleotide
  misc_feature (5)..(5): bases at these positons are RNA
acaauatgggatgagg

SEQ ID NO: 2842 - DNA, 16 bp, Artificial sequence
  Synthetic oligonucleotide
  misc_feature (5)..(5): bases at these positons are RNA
ggagugcatcttaaga

SEQ ID NO: 2843 - DNA, 16 bp, Artificial sequence
  Synthetic oligonucleotide
  misc_feature (5)..(5): bases at these positons are RNA
acatugcagttattag

SEQ ID NO: 2844 - DNA, 16 bp, Artificial sequence
  Synthetic oligonucleotide
  misc_feature (5)..(5): bases at these positons are RNA
aggcugtaagagtcag

SEQ ID NO: 2845 - DNA, 16 bp, Artificial sequence
  Synthetic oligonucleotide
  misc_feature (5)..(5): bases at these positons are RNA
gcttutgtccaccttt

SEQ ID NO: 2846 - DNA, 16 bp, Artificial sequence
  Synthetic oligonucleotide
  misc_feature (5)..(5): bases at these positons are RNA
atgcuacttgaacagt

SEQ ID NO: 2847 - DNA, 16 bp, Artificial sequence
  Synthetic oligonucleotide
  misc_feature (5)..(5): bases at these positons are RNA
tactugaacagtctta

SEQ ID NO: 2848 - DNA, 16 bp, Artificial sequence
  Synthetic oligonucleotide
  misc_feature (5)..(5): bases at these positons are RNA
atatuctgtggcatgg

SEQ ID NO: 2849 - DNA, 16 bp, Artificial sequence
  Synthetic oligonucleotide
  misc_feature (5)..(5): bases at these positons are RNA
tctcutagctgtgcac

SEQ ID NO: 2850 - DNA, 16 bp, Artificial sequence
  Synthetic oligonucleotide
  misc_feature (5)..(5): bases at these positons are RNA
tgtgutcttgttgata

SEQ ID NO: 2851 - DNA, 16 bp, Artificial sequence
  Synthetic oligonucleotide
  misc_feature (5)..(5): bases at these positons are RNA
caggutgagataaagc

SEQ ID NO: 2852 - DNA, 16 bp, Artificial sequence
  Synthetic oligonucleotide
  misc_feature (5)..(5): bases at these positons are RNA
accgutttgggctaat

SEQ ID NO: 2853 - DNA, 16 bp, Artificial sequence
  Synthetic oligonucleotide
  misc_feature (5)..(5): bases at these positons are RNA
agagutgcaccgtttt

SEQ ID NO: 2854 - DNA, 16 bp, Artificial sequence
  Synthetic oligonucleotide
  misc_feature (5)..(5): bases at these positons are RNA
attguctaaacatctc

SEQ ID NO: 2855 - DNA, 16 bp, Artificial sequence
  Synthetic oligonucleotide
  misc_feature (5)..(5): bases at these positons are RNA
cttaugtaatagccag

SEQ ID NO: 2856 - DNA, 16 bp, Artificial sequence
  Synthetic oligonucleotide
  misc_feature (5)..(5): bases at these positons are RNA
acacuaatattgaggc

SEQ ID NO: 2857 - DNA, 16 bp, Artificial sequence
  Synthetic oligonucleotide
  misc_feature (5)..(5): bases at these positons are RNA
cacauatgtgaagagc

SEQ ID NO: 2858 - DNA, 16 bp, Artificial sequence
  Synthetic oligonucleotide
  misc_feature (5)..(5): bases at these positons are RNA
tccauaataatagctc

SEQ ID NO: 2859 - DNA, 16 bp, Artificial sequence
  Synthetic oligonucleotide
  misc_feature (5)..(5): bases at these positons are RNA
ttagutagaatagtct

SEQ ID NO: 2860 - DNA, 16 bp, Artificial sequence
  Synthetic oligonucleotide
  misc_feature (5)..(5): bases at these positons are RNA
ctttutatagactggg

SEQ ID NO: 2861 - DNA, 16 bp, Artificial sequence
  Synthetic oligonucleotide
  misc_feature (5)..(5): bases at these positons are RNA
ttaguatagttatctt

SEQ ID NO: 2862 - DNA, 16 bp, Artificial sequence
  Synthetic oligonucleotide
  misc_feature (5)..(5): bases at these positons are RNA
ctgcugctagtgccaa

SEQ ID NO: 2863 - DNA, 16 bp, Artificial sequence
  Synthetic oligonucleotide
  misc_feature (5)..(5): bases at these positons are RNA
agacuttgagactctt

SEQ ID NO: 2864 - DNA, 16 bp, Artificial sequence
  Synthetic oligonucleotide
  misc_feature (5)..(5): bases at these positons are RNA
atctuaagatacccag

SEQ ID NO: 2865 - DNA, 16 bp, Artificial sequence
  Synthetic oligonucleotide
  misc_feature (5)..(5): bases at these positons are RNA
cagtuttcctcatgat

SEQ ID NO: 2866 - DNA, 16 bp, Artificial sequence
  Synthetic oligonucleotide
  misc_feature (5)..(5): bases at these positions are RNA
acagucttaaaccttc

SEQ ID NO: 2867 - DNA, 16 bp, Artificial sequence
  Synthetic oligonucleotide
  misc_feature (5)..(5): bases at these positions are RNA
agctuttgtccacctt

SEQ ID NO: 2868 - DNA, 16 bp, Artificial sequence
  Synthetic oligonucleotide
  misc_feature (5)..(5): bases at these positions are RNA
ctacutgaacagtctt

SEQ ID NO: 2869 - DNA, 16 bp, Artificial sequence
  Synthetic oligonucleotide
  misc_feature (5)..(5): bases at these positions are RNA
gatautctgtggcatg

SEQ ID NO: 2870 - DNA, 16 bp, Artificial sequence
  Synthetic oligonucleotide
  misc_feature (5)..(5): bases at these positions are RNA
tagcugtgcactcatt

SEQ ID NO: 2871 - DNA, 16 bp, Artificial sequence
  Synthetic oligonucleotide
  misc_feature (5)..(5): bases at these positions are RNA
gatcucttagctgtgc

SEQ ID NO: 2872 - DNA, 16 bp, Artificial sequence
  Synthetic oligonucleotide
  misc_feature (5)..(5): bases at these positions are RNA
gtttugggctaatgaa

SEQ ID NO: 2873 - DNA, 16 bp, Artificial sequence
  Synthetic oligonucleotide
  misc_feature (5)..(5): bases at these positions are RNA
gtatuccatctatcag

SEQ ID NO: 2874 - DNA, 16 bp, Artificial sequence
  Synthetic oligonucleotide
  misc_feature (5)..(5): bases at these positions are RNA
aacauctctgggacca

SEQ ID NO: 2875 - DNA, 16 bp, Artificial sequence
  Synthetic oligonucleotide
  misc_feature (5)..(5): bases at these positions are RNA
gtctugatgtagtggg

SEQ ID NO: 2876 - DNA, 16 bp, Artificial sequence
  Synthetic oligonucleotide
  misc_feature (5)..(5): bases at these positions are RNA
cttautggtaagtatt

SEQ ID NO: 2877 - DNA, 16 bp, Artificial sequence
  Synthetic oligonucleotide
  misc_feature (5)..(5): bases at these positions are RNA
cagautattatgtgat

SEQ ID NO: 2878 - DNA, 16 bp, Artificial sequence
  Synthetic oligonucleotide
  misc_feature (5)..(5): bases at these positions are RNA
ttaaugccaccctacc

SEQ ID NO: 2879 - DNA, 16 bp, Artificial sequence
  Synthetic oligonucleotide
  misc_feature (5)..(5): bases at these positions are RNA
gaaautgatacaccaa

SEQ ID NO: 2880 - DNA, 16 bp, Artificial sequence
  Synthetic oligonucleotide
  misc_feature (5)..(5): bases at these positions are RNA
ctgcuagtgccaaacc

SEQ ID NO: 2881 - DNA, 16 bp, Artificial sequence
  Synthetic oligonucleotide
  misc_feature (5)..(5): bases at these positions are RNA
catcutaagataccca

SEQ ID NO: 2882 - DNA, 16 bp, Artificial sequence
  Synthetic oligonucleotide
  misc_feature (5)..(5): bases at these positions are RNA
gcagutattagaagtc

SEQ ID NO: 2883 - DNA, 16 bp, Artificial sequence
  Synthetic oligonucleotide
  misc_feature (5)..(5): bases at these positions are RNA
aactucatagtggact

SEQ ID NO: 2884 - DNA, 16 bp, Artificial sequence
  Synthetic oligonucleotide
  misc_feature (5)..(5): bases at these positions are RNA
acaguaaaattatgcc

SEQ ID NO: 2885 - DNA, 16 bp, Artificial sequence
  Synthetic oligonucleotide
ttgagttctccactgc

SEQ ID NO: 2886 - DNA, 16 bp, Artificial sequence
  Synthetic oligonucleotide
  misc_feature (5)..(5): bases at these positions are RNA
gctguaagagtcagta

SEQ ID NO: 2887 - DNA, 16 bp, Artificial sequence
  Synthetic oligonucleotide
  misc_feature (5)..(5): bases at these positions are RNA
cgttugactgctgcta

SEQ ID NO: 2888 - DNA, 16 bp, Artificial sequence
  Synthetic oligonucleotide
  misc_feature (5)..(5): bases at these positions are RNA
gcctugaatagcaagc

SEQ ID NO: 2889 - DNA, 16 bp, Artificial sequence
  Synthetic oligonucleotide
  misc_feature (5)..(5): bases at these positions are RNA
aagtuagcccccagga

SEQ ID NO: 2890 - DNA, 16 bp, Artificial sequence
  Synthetic oligonucleotide
  misc_feature (5)..(5): bases at these positions are RNA
taccuctaagttagcc

SEQ ID NO: 2891 - DNA, 16 bp, Artificial sequence
  Synthetic oligonucleotide
  misc_feature (5)..(5): bases at these positions are RNA
cctcuaagttagcccc

SEQ ID NO: 2892 - DNA, 16 bp, Artificial sequence
  Synthetic oligonucleotide
  misc_feature (5)..(5): bases at these positions are RNA
atgtutatgtaagcac

SEQ ID NO: 2893 - DNA, 16 bp, Artificial sequence
  Synthetic oligonucleotide
  misc_feature (5)..(5): bases at these positions are RNA
aataugggatgaggta

SEQ ID NO: 2894 - DNA, 16 bp, Artificial sequence
  Synthetic oligonucleotide
  misc_feature (5)..(5): bases at these positions are RNA
gtttutaagaggcatg

SEQ ID NO: 2895 - DNA, 16 bp, Artificial sequence
  Synthetic oligonucleotide
  misc_feature (5)..(5): bases at these positions are RNA
tgatugagttctccac

SEQ ID NO: 2896 - DNA, 16 bp, Artificial sequence
  Synthetic oligonucleotide
  misc_feature (5)..(5): bases at these positions are RNA
tagcutttgtccacct

SEQ ID NO: 2897 - DNA, 16 bp, Artificial sequence
  synthetic oligonucleotide
ataagagatgagtagg

SEQ ID NO: 2898 - DNA, 16 bp, Artificial sequence
  synthetic oligonucleotide
tgcgagaaatctaaga

SEQ ID NO: 2899 - DNA, 16 bp, Artificial sequence
  synthetic oligonucleotide
tataacatggctggca

SEQ ID NO: 2900 - DNA, 16 bp, Artificial sequence
  synthetic oligonucleotide
aaaatatgtccaggtt

SEQ ID NO: 2901 - DNA, 16 bp, Artificial sequence
  synthetic oligonucleotide
gtagtgtaagctgaga

SEQ ID NO: 2902 - DNA, 16 bp, Artificial sequence
  synthetic oligonucleotide
atgttatctcaagtca

SEQ ID NO: 2903 - DNA, 16 bp, Artificial sequence
  synthetic oligonucleotide
gatttaaaatagagtc

SEQ ID NO: 2904 - DNA, 16 bp, Artificial sequence
  synthetic oligonucleotide
ctcccacaaaactaac

SEQ ID NO: 2905 - DNA, 16 bp, Artificial sequence
  synthetic oligonucleotide
ttctgtaggactctgc

SEQ ID NO: 2906 - DNA, 16 bp, Artificial sequence
  synthetic oligonucleotide
aaaattatgccttgtg

SEQ ID NO: 2907 - DNA, 16 bp, Artificial sequence
  synthetic oligonucleotide
tacattagcaagctaa

SEQ ID NO: 2908 - DNA, 16 bp, Artificial sequence
  synthetic oligonucleotide
gctgagagttatctgg

SEQ ID NO: 2909 - DNA, 16 bp, Artificial sequence
  synthetic oligonucleotide
tcatagtttatatgga

SEQ ID NO: 2910 - DNA, 16 bp, Artificial sequence
  synthetic oligonucleotide
ttgaagacaatacagg

SEQ ID NO: 2911 - DNA, 16 bp, Artificial sequence
  synthetic oligonucleotide
ataggctaaaatggtc

SEQ ID NO: 2912 - DNA, 16 bp, Artificial sequence
  synthetic oligonucleotide
aaaagactttgagact

SEQ ID NO: 2913 - DNA, 16 bp, Artificial sequence
  synthetic oligonucleotide
acagaggagtttgcag

SEQ ID NO: 2914 - DNA, 16 bp, Artificial sequence
  synthetic oligonucleotide
ttttaagaggcatgaa

SEQ ID NO: 2915 - DNA, 16 bp, Artificial sequence
  synthetic oligonucleotide
catcaagacattctag

SEQ ID NO: 2916 - DNA, 16 bp, Artificial sequence
  synthetic oligonucleotide
aactgaaggtctgagc

SEQ ID NO: 2917 - DNA, 16 bp, Artificial sequence
  synthetic oligonucleotide
tgaatgtaaaggctgg

SEQ ID NO: 2918 - DNA, 16 bp, Artificial sequence
  synthetic oligonucleotide
tacagttccttttcct

SEQ ID NO: 2919 - DNA, 16 bp, Artificial sequence
  synthetic oligonucleotide
tcgggaagtttagaca

SEQ ID NO: 2920 - DNA, 16 bp, Artificial sequence
  synthetic oligonucleotide
gactttcatagggaga

SEQ ID NO: 2921 - DNA, 16 bp, Artificial sequence
  synthetic oligonucleotide
attatgaggatctgga

SEQ ID NO: 2922 - DNA, 16 bp, Artificial sequence
  synthetic oligonucleotide
gattacccctggcttt

SEQ ID NO: 2923 - DNA, 16 bp, Artificial sequence
  synthetic oligonucleotide
tatcataccacatacc

SEQ ID NO: 2924 - DNA, 16 bp, Artificial sequence
  synthetic oligonucleotide
cactgatttagttggt

SEQ ID NO: 2925 - DNA, 16 bp, Artificial sequence
  synthetic oligonucleotide
ccagtaggtgtgtttc

SEQ ID NO: 2926 - DNA, 16 bp, Artificial sequence
  synthetic oligonucleotide
ggtcagtagagagcat

SEQ ID NO: 2927 - DNA, 16 bp, Artificial sequence
  synthetic oligonucleotide
gataccagtttttccc

SEQ ID NO: 2928 - DNA, 16 bp, Artificial sequence
  synthetic oligonucleotide
agatgtacactgacaa

SEQ ID NO: 2929 - DNA, 16 bp, Artificial sequence
  synthetic oligonucleotide
tgcagttattagaagt

SEQ ID NO: 2930 - DNA, 16 bp, Artificial sequence
  synthetic oligonucleotide
ctccgttataagtttc

SEQ ID NO: 2931 - DNA, 16 bp, Artificial sequence
  synthetic oligonucleotide
actagaactcccaacc

SEQ ID NO: 2932 - DNA, 16 bp, Artificial sequence
  synthetic oligonucleotide
ttagagtgcttagttc

SEQ ID NO: 2933 - DNA, 16 bp, Artificial sequence
  synthetic oligonucleotide
tttagcagcttggaag

SEQ ID NO: 2934 - DNA, 16 bp, Artificial sequence
  synthetic oligonucleotide
tgatatgtcaatactc

SEQ ID NO: 2935 - DNA, 16 bp, Artificial sequence
  synthetic oligonucleotide
ggatatgtcatctaaa

SEQ ID NO: 2936 - DNA, 16 bp, Artificial sequence
  synthetic oligonucleotide
gtcctttgtatttcgc

SEQ ID NO: 2937 - DNA, 16 bp, Artificial sequence
  synthetic oligonucleotide
attttcagatcccgtt

SEQ ID NO: 2938 - DNA, 16 bp, Artificial sequence
  synthetic oligonucleotide
tacagactaagggacc

SEQ ID NO: 2939 - DNA, 16 bp, Artificial sequence
  synthetic oligonucleotide
ccccaaacatggatgt

SEQ ID NO: 2940 - DNA, 16 bp, Artificial sequence
  synthetic oligonucleotide
ttattggtaagtattc

SEQ ID NO: 2941 - DNA, 16 bp, Artificial sequence
  synthetic oligonucleotide
ggctactttcaaacct

SEQ ID NO: 2942 - DNA, 16 bp, Artificial sequence
  synthetic oligonucleotide
gttttgcaagtttatc

SEQ ID NO: 2943 - DNA, 16 bp, Artificial sequence
  synthetic oligonucleotide
agtagtaattctaaac

SEQ ID NO: 2944 - DNA, 16 bp, Artificial sequence
  synthetic oligonucleotide
tccgaaaaaagtggag

SEQ ID NO: 2945 - DNA, 16 bp, Artificial sequence
  synthetic oligonucleotide
gagagaacttatacaa

SEQ ID NO: 2946 - DNA, 16 bp, Artificial sequence
  synthetic oligonucleotide
cagaaggatttctagg

SEQ ID NO: 2947 - DNA, 16 bp, Artificial sequence
  synthetic oligonucleotide
cccgcccttaagtcat

SEQ ID NO: 2948 - DNA, 16 bp, Artificial sequence
  synthetic oligonucleotide
gctagacaattgcaaa

SEQ ID NO: 2949 - DNA, 16 bp, Artificial sequence
  synthetic oligonucleotide
ttcccaacgcaacagt

SEQ ID NO: 2950 - DNA, 16 bp, Artificial sequence
  synthetic oligonucleotide
gagcattcatcagatg

SEQ ID NO: 2951 - DNA, 16 bp, Artificial sequence
  synthetic oligonucleotide
agttttcacctcaggt

SEQ ID NO: 2952 - DNA, 16 bp, Artificial sequence
  synthetic oligonucleotide
agacagaccaagtagc

SEQ ID NO: 2953 - DNA, 16 bp, Artificial sequence
  synthetic oligonucleotide
accacactaatgaatc

SEQ ID NO: 2954 - DNA, 16 bp, Artificial sequence
  synthetic oligonucleotide
tgagatgggcaaggcc

SEQ ID NO: 2955 - DNA, 16 bp, Artificial sequence
  synthetic oligonucleotide
ggcaagacagactgtt

SEQ ID NO: 2956 - DNA, 16 bp, Artificial sequence
  synthetic oligonucleotide
gattgagttctccact

SEQ ID NO: 2957 - DNA, 16 bp, Artificial sequence
  synthetic oligonucleotide
ttagaatagtcttcag

SEQ ID NO: 2958 - DNA, 16 bp, Artificial sequence
  synthetic oligonucleotide
agctggtaaaggtaag

SEQ ID NO: 2959 - DNA, 16 bp, Artificial sequence
  synthetic oligonucleotide
atgtagtgtttacaag

SEQ ID NO: 2960 - DNA, 16 bp, Artificial sequence
  synthetic oligonucleotide
gttaacctgcagcaga

SEQ ID NO: 2961 - DNA, 16 bp, Artificial sequence
  synthetic oligonucleotide
tagaaactgctcctca

SEQ ID NO: 2962 - DNA, 16 bp, Artificial sequence
  synthetic oligonucleotide
gtgacataactacttc

SEQ ID NO: 2963 - DNA, 16 bp, Artificial sequence
  synthetic oligonucleotide
taagtgtaagagacat

SEQ ID NO: 2964 - DNA, 16 bp, Artificial sequence
  synthetic oligonucleotide
ggagctagatactcaa

SEQ ID NO: 2965 - DNA, 16 bp, Artificial sequence
  synthetic oligonucleotide
tcctacagtgcttagt

SEQ ID NO: 2966 - DNA, 16 bp, Artificial sequence
  synthetic oligonucleotide
aaggagccagttatga

SEQ ID NO: 2967 - DNA, 16 bp, Artificial sequence
  synthetic oligonucleotide
atgcagctataggtag

SEQ ID NO: 2968 - DNA, 16 bp, Artificial sequence
  Synthetic oligonucleotide
  misc_feature (5)..(5): bases at these positions are RNA
gtctuaaaccttccct

SEQ ID NO: 2969 - DNA, 16 bp, Artificial sequence
  synthetic oligonucleotide
  misc_feature (5)..(5): bases at these positions are RNA
gttcutgttgatattc

SEQ ID NO: 2970 - DNA, 16 bp, Artificial sequence
  synthetic oligonucleotide
  misc_feature (5)..(5): bases at these positions are RNA
attcugtggcatggct

SEQ ID NO: 2971 - DNA, 16 bp, Artificial sequence
  synthetic oligonucleotide
  misc_feature (5)..(5): bases at these positions are RNA
ttgauctcttagctgt

SEQ ID NO: 2972 - DNA, 16 bp, Artificial sequence
  synthetic oligonucleotide
  misc_feature (5)..(5): bases at these positions are RNA
cgttutgggctaatga

SEQ ID NO: 2973 - DNA, 16 bp, Artificial sequence
  synthetic oligonucleotide
  misc_feature (5)..(5): bases at these positions are RNA
agagucggtcaccttt

SEQ ID NO: 2974 - DNA, 16 bp, Artificial sequence
  synthetic oligonucleotide
  misc_feature (5)..(5): bases at these positions are RNA
agaauagagttgcacc

SEQ ID NO: 2975 - DNA, 16 bp, Artificial sequence
  synthetic oligonucleotide
  misc_feature (5)..(5): bases at these positions are RNA
tcggucacctttcata

SEQ ID NO: 2976 - DNA, 16 bp, Artificial sequence
  synthetic oligonucleotide
  misc_feature (5)..(5): bases at these positions are RNA
ccaguacagttccttt

SEQ ID NO: 2977 - DNA, 16 bp, Artificial sequence
  synthetic oligonucleotide
  misc_feature (5)..(5): bases at these positions are RNA
tatguaatagccagta

SEQ ID NO: 2978 - DNA, 16 bp, Artificial sequence
  synthetic oligonucleotide
  misc_feature (5)..(5): bases at these positions are RNA
gatguagtgggagtcg

SEQ ID NO: 2979 - DNA, 16 bp, Artificial sequence
  synthetic oligonucleotide
  misc_feature (5)..(5): bases at these positions are RNA
ttctuatgtaatagcc

SEQ ID NO: 2980 - DNA, 16 bp, Artificial sequence
  synthetic oligonucleotide
  misc_feature (5)..(5): bases at these positions are RNA
ataguccatgcaaaag

SEQ ID NO: 2981 - DNA, 16 bp, Artificial sequence
  synthetic oligonucleotide
  misc_feature (5)..(5): bases at these positions are RNA
aatautgaggcactgg

SEQ ID NO: 2982 - DNA, 16 bp, Artificial sequence
  synthetic oligonucleotide
  misc_feature (5)..(5): bases at these positions are RNA
cctauatacatccaag

SEQ ID NO: 2983 - DNA, 16 bp, Artificial sequence
  synthetic oligonucleotide
  misc_feature (5)..(5): bases at these positions are RNA
tctcutgacaatggtt

SEQ ID NO: 2984 - DNA, 16 bp, Artificial sequence
  synthetic oligonucleotide
  misc_feature (5)..(5): bases at these positions are RNA
tatgugattgagttct

SEQ ID NO: 2985 - DNA, 16 bp, Artificial sequence
  synthetic oligonucleotide
  misc_feature (5)..(5): bases at these positions are RNA
acggugatcaaatgta

SEQ ID NO: 2986 - DNA, 16 bp, Artificial sequence
  synthetic oligonucleotide
  misc_feature (5)..(5): bases at these positions are RNA
acatuagcaagctaag

SEQ ID NO: 2987 - DNA, 16 bp, Artificial sequence
  synthetic oligonucleotide
  misc_feature (5)..(5): bases at these positions are RNA
gcatuaatgccaccct

SEQ ID NO: 2988 - DNA, 16 bp, Artificial sequence
  synthetic oligonucleotide
  misc_feature (5)..(5): bases at these positions are RNA
ctagugccaaaccaat

SEQ ID NO: 2989 - DNA, 16 bp, Artificial sequence
  synthetic oligonucleotide
  misc_feature (5)..(5): bases at these positions are RNA
gtaaucacaagtaagg

1-108. (canceled)

109. An oligomeric compound, according to the following chemical structure: [chemical structure]
or a pharmaceutically acceptable salt thereof.

110. An oligomeric compound, according to the following chemical structure:

[chemical structure]

111. An oligomeric compound comprising a modified oligonucleotide consisting of 16 linked nucleosides having a nucleobase sequence SEQ ID NO: 1448, wherein the modified oligonucleotide comprises
a gap segment consisting of ten linked deoxynucleosides;
a 5′ wing segment consisting of three linked nucleosides; and
a 3′ wing segment consisting of three linked nucleosides;
wherein the gap segment is positioned between the 5′ wing segment and the 3′ wing segment; wherein the 5′ wing segment and the 3′ wing segment comprise cEt sugars; wherein each internucleoside linkage is a phosphorothioate linkage; and wherein each cytosine is a 5-methylcytosine.

112. The oligomeric compound of claim 109, which is a sodium salt or a potassium salt.

113. A pharmaceutical composition comprising the oligomeric compound of any one of claims 109-112 and a pharmaceutically acceptable diluent.

114. The pharmaceutical composition of claim 113, wherein the pharmaceutically acceptable diluent is water.

115. A method of treating a disease associated with HSD17B13 in an individual comprising administering to the individual a compound of any one of claims 109-112, thereby treating the disease.

116. The method of claim 115, wherein the individual has a liver disease, NAFLD, NASH, alcoholic steatohepatitis (ASH), alcoholic liver disease, nonalcoholic liver disease, alcoholic cirrhosis, nonalcoholic cirrhosis, steatohepatisis, hepatic steatosis, hepatocellular carcinoma, alcoholic liver disease, HCV hepatitis, chronic hepatitis, hereditary hemochromatosis, or primary sclerosing cholangitis.

117. A method of inhibiting expression of HSD17B13 in a cell comprising contacting the cell with an oligomeric compound of any one of claims 109-112, thereby inhibiting expression of HSD17B13 in the cell.

118. The method of claim 117, wherein the cell is in the liver of an individual.

119. The method of claim 118, wherein the individual has, or is at risk of having, liver disease, NAFLD, NASH, alcoholic steatohepatitis (ASH), alcoholic liver disease, nonalcoholic liver disease, alcoholic cirrhosis, nonalcoholic cirrhosis, steatohepatisis, hepatic steatosis, hepatocellular carcinoma, alcoholic liver disease, HCV hepatitis, chronic hepatitis, hereditary hemochromatosis, or primary sclerosing cholangitis.

120. A method of ameliorating liver damage, steatosis, liver fibrosis, liver inflammation, liver scarring or cirrhosis, liver failure, liver enlargement, elevated transaminases, or hepatic fat accumulation in an individual, comprising administering an oligomeric compound of any one of claims 109-112 to the individual, thereby ameliorating liver damage, steatosis, liver fibrosis, liver inflammation, liver scarring or cirrhosis, liver failure, liver enlargement, elevated transaminases, or hepatic fat accumulation in the individual.

121. The method of claim 120, wherein the individual has, or is at risk of having, liver disease, NAFLD, NASH, alcoholic steatohepatitis (ASH), alcoholic liver disease, nonalcoholic liver disease, alcoholic cirrhosis, nonalcoholic cirrhosis, steatohepatisis, hepatic steatosis, hepatocellular carcinoma, alcoholic liver disease, HCV hepatitis, chronic hepatitis, hereditary hemochromatosis, or primary sclerosing cholangitis.
